United States Patent Application Publication US 2004/0009491 A1 - sequence listing, part 2

SEQ ID NO: 2365 - protein, 545 aa, Homo sapiens
  MISC_FEATURE (34): Xaa equals any of the twenty naturally occurring L-amino acids
  MISC_FEATURE (205): Xaa equals any of the twenty naturally occurring L-amino acids
  MISC_FEATURE (301): Xaa equals any of the twenty naturally occurring L-amino acids
  MISC_FEATURE (542): Xaa equals any of the twenty naturally occurring L-amino acids
MQVYDLAALRDYWSYLERRLFSRLEDIYRPTIHXLKTSLFRFYLVYTIQTNRNDKAQEFFAKQATELQNQAEWKDWFVLPFLPSPDTNPTFATYFSRQWADTFIVSLHNFLSVLFQCMPVPVILNFDAECQRTNQVQEENEVLRQKLFALQAEIHRLKKEEQQPEEEEALVQHKLPPYVSNMDRLGDSELAMVCSQRNASLSQSXRVGFLSSLLPQSKKSPSRLSPAQGPPQPQSSAKKESFGGQGTKGKDPTSGAKDGKSLLSGLATGESGWSQHRQRRLQDHGKERKELFSTTTSQCAXKKPEASGPEAEPCPELHTEPVEPLTRASSAGPEGGGVRPEQPFIVLGQEEYGEHHSSIMHCRVDCSGRRVASLDVDGVIKVWSFNPIMQTKASSISKSPLLSLEWATKRDRLLLLGSGVGTVRLYDTEAKKNLCEININDNMPRILSLACSPNGPSFVCSAAAPSLTSQVDFSAPDIGSKGMNQVPGRLLLWDTKTMKQQLQFSLDPEPIAINCTAFNHNGNLLVTGAADGVIRLFDISSXSAR

SEQ ID NO: 2366 - protein, 136 aa, Homo sapiens
  MISC_FEATURE (93): Xaa equals any of the twenty naturally occurring L-amino acids
  MISC_FEATURE (119): Xaa equals any of the twenty naturally occurring L-amino acids
  MISC_FEATURE (135): Xaa equals any of the twenty naturally occurring L-amino acids
MADILEKIKNLFMWVQPEITQKLYVALWAAFLASCFFPYRLVGLAVGLYAGIKFFLIDFIFKRCPRLRAKYDTPYIIWRSLPTDPQLKERSSXAVFTAGCRRTSSRELTYPAAPAGLGXRGRDAGSFSTAPRRAXS

SEQ ID NO: 2367 - protein, 303 aa, Homo sapiens
  MISC_FEATURE (210): Xaa equals any of the twenty naturally occurring L-amino acids
  MISC_FEATURE (286): Xaa equals any of the twenty naturally occurring L-amino acids
  MISC_FEATURE (288): Xaa equals any of the twenty naturally occurring L-amino acids
MAMAQKLSHLLPSLRQVIQEPQLSLQPEPVFTVDRAEVPPLFWKPYIYAGYRPLHQTWRFYFRTLFQQHNEAVNVWTHLLAALVLLLRLALFVETVDFWGDPHALPLFIIVLASFTYLSFSALAHLLQAKSEFWHYSFFFLDYVGVAVYQFGSALAHFYYAIEPAWHAQVQAGFLPMAAFLAWLFCIGSCYNKYIQKPGLLGRHARRCPXSWPTHWTLVLWCIVSSCPPTPPRMIQLFSTTSARWSSFCWLLPSSLPSCPSAGSLAAAMSSGRATNFSTSSWCCAXWXSWRLWHWTMSPTAHL

SEQ ID NO: 2368 - protein, 288 aa, Homo sapiens
MCVFQGYSSKGLIQRSVFNLQIYGVLGLFWTLNWVLALGQCVLAGAFASFYWAFHKPQDIPTFPLISAFIRTLRYHTGSLAFGALILTLVQIARVILEYIDHKLRGVQNPVARCIMCCFKCCLWCLEKFIKFLNRNAYIMIAIYGKNFCVSAKNAFMLLMRNIVRVVVLDKVTDLLLFFGKLLVVGGVGVLSFFFFSGRIPGLGKDFKSPHLNYYWLPIMTSILGAYVIASGFFSVFGMCVDTLFLCFLEDLERNNGSLDRPYYMSKSLLKILGKKNEAPPDNKKRKK

SEQ ID NO: 2369 - protein, 199 aa, Homo sapiens
  MISC_FEATURE (152): Xaa equals any of the twenty naturally occurring L-amino acids
  MISC_FEATURE (191): Xaa equals any of the twenty naturally occurring L-amino acids
  MISC_FEATURE (196): Xaa equals any of the twenty naturally occurring L-amino acids
  MISC_FEATURE (199): Xaa equals any of the twenty naturally occurring L-amino acids
MASSLLAGERLVRALGPGGELEPERLPRKLRAELEAALGKKHKGGDSSSGPQRLVSFRLIRDLHQHLRERDSKLYLHELLEGSEIYLPEVVKPPRNPELVARLEKIKIQLANEEYKRITRNVTCQDTRHGGTLSDLGKQVRSLKALVITIFXFIVHGGCCLRLHLPWKPLSYRNGSGVLNDALWGGWPLMXGRQGXTGX

SEQ ID NO: 2370 - protein, 533 aa, Homo sapiens
MIKLSEKGVFLASNNEIIAEEHFTGEIKKEEAKKGTIAWSILSSHNTSGNMDKLKIKFDSLASHDITFVGIVQTAKASGMERFPLPYVLTNCHNSLCAVGGTINGDDHVFGLSAAQRYGGIFVPPHIAVIHQYMREMMAGGGKMILGSDSHTRYGALGTMAVGEGGGELVKQLLNDTWDIDYPGVVAVHLTGKPAPYVGPQDVALAIIGAVFKNGYVKNKVMEFVGPGVSALSTDFRNSVDVMTTETTCLSSVWQTDEEVHNWLALHGRGQDYCQLNPQPMAYYDGCISVDLSAIKPMIALPFHPSNVYEIDTLNQNLTDILREIEIESERVAHGKAKLSLLDKVENGRLKVQQGIIAGCSGGNYENVIAAANALRGQSCGNDTFSLAVYPSSQPVFMDLAKKGVVADLIGAGAIIRTAFCGPCFGAGDTPINNGLSIRHTTRNFPNREGSKPANGQMSAVALMDARSIAATAANGGYLTSASELDCWDNVPEYAFDVTPYKNRVYQGFVKGATQQPLIYGGARYPIRPIVSR

SEQ ID NO: 2371 - protein, 150 aa, Homo sapiens
  MISC_FEATURE (3): Xaa equals any of the twenty naturally occurring L-amino acids
  MISC_FEATURE (5): Xaa equals any of the twenty naturally occurring L-amino acids
  MISC_FEATURE (63): Xaa equals any of the twenty naturally occurring L-amino acids
  MISC_FEATURE (141): Xaa equals any of the twenty naturally occurring L-amino acids
  MISC_FEATURE (144): Xaa equals any of the twenty naturally occurring L-amino acids
MLXEXCPSPAERRSCLSWGIMWVEKEVFYEQNQHRGREEEVFRGCREPPEDVGTVCQHGGGSXPHGGTLLRVASSRDFQGLGFSVCLCSLVCLIGGGPHDSWPLCVSLLAVSDLGPKGHRGARALQMGRKSSPRKKKKKNXGGXFGGARG

SEQ ID NO: 2372 - protein, 137 aa, Homo sapiens
  MISC_FEATURE (124): Xaa equals any of the twenty naturally occurring L-amino acids
MKAQDCRRGAVHGSRTRLCPLGEGVLSHEVPIRHPRGPYHPFLSEGVFGAWGRLAVQPVWGPSRPTLPWAFLDSRPGLCVACWEVGCSTEACDCVPAASSLRISLGPGTSHVPSCQRREVSLLXEIFNFGFALVLSF

SEQ ID NO: 2373 - protein, 157 aa, Homo sapiens
MGSLVYLRQGIENSPYVHLLDANQWADICDIFTRDACALLGLSVESPLSVSFSAGCVALPALINIKAVIEQRQCTGVWNQKDELPIEVDLGKKCWYHSIFACPILRQQTTDNNPPMKLVCGHIISRDALNKMFNGSKLKCPYCPMEQSPGDAKQIFF

SEQ ID NO: 2374 - protein, 135 aa, Homo sapiens
  MISC_FEATURE (111): Xaa equals any of the twenty naturally occurring L-amino acids
  MISC_FEATURE (129): Xaa equals any of the twenty naturally occurring L-amino acids
  MISC_FEATURE (133): Xaa equals any of the twenty naturally occurring L-amino acids
MRRGWKMALSGGLRCCRRVLSWVPVLVIVLVVLWSYYAYVFELCLVTVLSPAEKVIYLILYHAIFVFFTWTYWKSIFTLPQQPNQKFHLSYTDKERYENEERPEVQKQMLXDMAKKLPVYTRTGSGADXSVTXVI

SEQ ID NO: 2375 - protein, 168 aa, Homo sapiens
  MISC_FEATURE (146): Xaa equals any of the twenty naturally occurring L-amino acids
MLLCMSLTVLFDMVIAISVGIVLASLLFMRRIARMTRLAPVVVDVPDDVLVLRVIGPLFFAAAEGLFTDLESRLEGKRIVILKWDAVPVLDAGGLDAFQRFVKRLPEGCELRVCKWNSSHCALWLALAFNRSRDAWRSSRIVARRXRIYKYEIDQSAQTDWSANCIIC

SEQ ID NO: 2376 - protein, 136 aa, Homo sapiens
  MISC_FEATURE (90): Xaa equals any of the twenty naturally occurring L-amino acids
MQRTAVAITHQQRMKQGILRLWRNWLLWLLILLLRRNRLLRLLILLLWRNRLLRLLILWLRRNRLLWLLILRLRRNWLLRLLILLLRCNXCCGCCTGSTIGVNNGSCGPSSSNAFIGENSKSSSENGFAPAGCSPE

SEQ ID NO: 2377 - protein, 118 aa, Homo sapiens
MQGAACDTWPALSQLPPLPFLSCLPCPQKERRGLTYHLCHSTWSQNPKSFPRPHCLAPQGPLSWVLCCAFPCLPPAASVTADPRPNGKPSAQLLLHWNKLLFLYVDVLLWSSSLPIKS

SEQ ID NO: 2378 - protein, 609 aa, Homo sapiens
  MISC_FEATURE (604): Xaa equals any of the twenty naturally occurring L-amino acids
  MISC_FEATURE (605): Xaa equals any of the twenty naturally occurring L-amino acids
MASLTKILVIGLKPSLKVWMTFPYGRMDPSSVPLLAWHFVAVQNYVNPMLAFCRGDVVHFLLVKRDESGAIHVTKQKHLHLYYDLINFTWINSRTVVLLDSVEKLHVIDRQTQEELETVEISEVQLVYNSSHFKSLATGGNVSQALALVGEKACYQSISSYGGQIFYLGTKSVYVMMLRSWRERVDHLLKQDCLTEALALAWSFHEGKAKAVVGLSGDASKRKAIGADRMVEILFHYADRALKKCPDQGKIQVMEQHFQDMVPVIVDYCLLLQRKDLLFSQMYDKLSENSVAKGVFLECLEPYILSDKLVGITPQVMKDLIVHFQDKKLMENVEALIVHMDITSLDIQQVVLMCWENRLYDAMIYVYNRGMNEFISPMEKLFRVIAPPLNAGKTLTDEQVVMGNKLLVYISCCLAGRAYPLGDIPEDLVPLVKNQVFEFLIRLHSAEASPEEEIYPYIRTLLHFDTREFLNVLALTFEDFKNDKQAVEYQQRIVDILLKVMVENSDFTPSQVGCLFTFLARQLAKPDNTLFVNRTLFDQVLEFLCSPDDDSRHSERQQVLLELLQAGGIVQFEESRLIRMAEKAEFYQICEFMYEREHQYDQNXXLPLT

SEQ ID NO: 2379 - protein, 129 aa, Homo sapiens
  MISC_FEATURE (87): Xaa equals any of the twenty naturally occurring L-amino acids
MMRACNLVATAALTAGQLTFLLGLVGLPLLSPDAPCWEEAMAAAFQLASFVLVIGLVTFYRIGPYTNLSWSCYLNIGACLLATLAAXCCIWNILHKREDCMAPRVIVISRSLTARFRRGLDNDYVESPC

SEQ ID NO: 2380 - protein, 149 aa, Homo sapiens
  MISC_FEATURE (38): Xaa equals any of the twenty naturally occurring L-amino acids
MAQSDTCHLFCLLPRLLCVDWLGSALKASRTLTFSSWXSLGWWTPSYSAATWRRVLCSECGRRNTFGCSHTPSDYAPVNTSEYIPALLIFLFILNLFLCEINGGRNLRATSSNSLWSLRIFFVFYFLISVAFQLQMLKFVMTNMTNCHG

SEQ ID NO: 2381 - protein, 178 aa, Homo sapiens
  MISC_FEATURE (134): Xaa equals any of the twenty naturally occurring L-amino acids
  MISC_FEATURE (171): Xaa equals any of the twenty naturally occurring L-amino acids
  MISC_FEATURE (172): Xaa equals any of the twenty naturally occurring L-amino acids
  MISC_FEATURE (173): Xaa equals any of the twenty naturally occurring L-amino acids
MIMLRFLNQCSQGRGAWLLMAFTALALELTALWFQHVMLLKPCVLCIYERCALFGVLGAALIGAIAPKTPLRYVAMVIWLYSAFRGVQLTYEHTMLQLYPSPFATCDFMVRFPEWLPLDKWVPQVFVASGDCAXRQWDFLGLEMPQWLLGIFIAYLIVAVLVVISQPFKAXXXDLFGR

SEQ ID NO: 2382 - protein, 202 aa, Homo sapiens
  MISC_FEATURE (188): Xaa equals any of the twenty naturally occurring L-amino acids
MWAGMWGSTKGLGLALLSAWEQLGLSVAIWTDLFLSCLHGLMLVALLLVVVTWRVCQKSHCFRLGRQLSKALQVNCVVRKLLVQLRRLYWWVETMTALTSWHLAYLITWTTCLASHLLQAAFEHTTQLPRPRRLNPRRSQGLPCCPHCLRPRTQSLEQFCQSKKLPENKCIPICKKKKKKKKKKKKKXKKKKKKKKKKKKLE

SEQ ID NO: 2383 - protein, 155 aa, Homo sapiens
MLENLNLSLFSLINATPDSAPWMISLAIFIAKDLITVVPLLAVVLWLWGLTAQRQLVIKIAIALAVSLFVSWTMGHLFPHDRPFVENIGYNFLHHAADDSFPSDHGTVIFTFALAFLCWHRLWSGSLLMVLAVVIAWSRVYLGVQYPIRPIVATQ

SEQ ID NO: 2384 - protein, 708 aa, Homo sapiens
MKDMPLRIHVLLGLAITTLVQAVDKKVDCPRLCTCEIRPWFTPRSIYMEASTVDCNDLGLLTFPARLPANTQILLLQTNNIAKIEYSTDFPVNLTGLDLSQNNLSSVTNINVKKMPQLLSVYLEENKLTELPEKCLSELSNLQELYINHNLLSTISPGAFIGLHNLLRLHLNSNRLQMINSKWFDALPNLEILMIGENPIIRIKDMNFKPLINLRSLVIAGINLTEIPDNALVGLENLESISFYDNRLIKVPHVALQKVVNLKFLDLNKNPINRIRRGDFSNMLHLKELGINNMPELISIDSLAVDNLPDLRKIEATNNPRLSYIHPNAFFRLPKLESLMLNSNALSALYHGTIESLPNLKEISIHSNPIRCDCVIRWMNMNKTNIRFMEPDSLFCVDPPEFQGQNVRQVHFRDMMEICLPLIAPESFPSNLNVEAGSYVSFHCRATAEPQPEIYWITPSGQKLLPNTLTDKFYVHSEGTLDINGVTPKEGGLYTCIATNLVGADLKSVMIKVDGSFPQDNNGSLNIKIRDIQANSVLVSWKASSKILKSSVKWTAFVKTENSHAAQSARIPSDVKVYNLTHLNPSTEYKICIDIPTIYQKNRKKCVNVTTKGLHPDQKEYEKNNTTTLMACLGGLLGIIGVICLISCLSPEMNCDGGHSYVRNYLQKPTFALGELYPPLINLWEAGKEKSTSLKVKATVIGLPTNMS

SEQ ID NO: 2385 - protein, 194 aa, Homo sapiens
  MISC_FEATURE (22): Xaa equals any of the twenty naturally occurring L-amino acids
  MISC_FEATURE (99): Xaa equals any of the twenty naturally occurring L-amino acids
  MISC_FEATURE (160): Xaa equals any of the twenty naturally occurring L-amino acids
MSVCCHARTPRSCYAKESSSEXYVPDVFYKDVDKFGNEITQLARPLPVEYLIIDITTTFPKDPVYTFSISQNPFPIENRDVLGETQDFHSLATYLSQNXSSVFLDTISDFHLLLFLVTNEVMPLQDSISLLLEAVRTRNEELAQTWKRSEQWATIEQLCXSQGTCAGLSPGITDVYTQDTKISSGWVIGLMVKG

SEQ ID NO: 2386 - protein, 108 aa, Homo sapiens
MSCPLALRSSPVISERDSALMATAVTRDCAAPSAGFCSVVHVPFLPWSQQRRCGSGLGCVCFVCGPCSLLGSLFLERVTASLSRSVDISGRSGRGHLAPCSGLRLPPA

SEQ ID NO: 2387 - protein, 392 aa, Homo sapiens
  MISC_FEATURE (76): Xaa equals any of the twenty naturally occurring L-amino acids
  MISC_FEATURE (85): Xaa equals any of the twenty naturally occurring L-amino acids
  MISC_FEATURE (370): Xaa equals any of the twenty naturally occurring L-amino acids
MKVHVNPSQSLLTLEGDDVETFNHALQHVAYMNTLRFATPGVRPLRLTTAVKCFSEESCVSIPEVEGYVVVLQPDXPQILLSGTXHFARPAVDFEGTNGVPLFPDLQITCSISHQVEAKKDESWQGTVTDTRMSDEIVHNLDGCEISLVGDDLDPERESLLLDTTSLQQRGLELTNTSAYLTIAGVESITVYEEILRQARYRLRHGAALYTRKFRLSCSEMNGRYSSNEFIVEVNVLHSMNRVAHPSHVLSSQQFLHRGHQPPPEMAGHSLASSHRNSMIPSAATLIIVVCVGFLVLMVVLGLVRIHSLHRRVSGAGGPPGASSDPKDPDLFWDDSALTIIVNPMESYQNRQSCVTGAVGGQQEDEDSSXSEVADSPSSDERRIIETPPHRY

SEQ ID NO: 2388 - protein, 143 aa, Homo sapiens
  MISC_FEATURE (135): Xaa equals any of the twenty naturally occurring L-amino acids
MAFFVFETLTAQRLHPMQYLLVGLSLVMFYLLLLALSEHTGFTVAWIIASLIGAIMNGIYLQAVLKGWCNSMLFTLALLLLDGVMWGLLNSADSALLLGTSVLVVALAGMMFVTRNIDWYAFSLPKMKASKEVTXDDELRIWK

SEQ ID NO: 2389 - protein, 117 aa, Homo sapiens [sequence omitted]

SEQ ID NO: 2390 - protein, 184 aa, Homo sapiens
MPQSWVPRGLPHFPLCDVYLQPDRCHGKTPSVIILIRTVSPELKSYALGVLFLLLRLLGFIPPPLIFGAGIDSTCLFWSTFCGEQGACVLYDNVVYRYLYVSIAIALKSFAFILYTTTWQCLRKNYKRYIKNHEGGLSTSEFFASTLTLDNLGRDPVPANQTHRTKFIYNLEDHEWCENMESVL

SEQ ID NO: 2391 - protein, 219 aa, Homo sapiens
  MISC_FEATURE (64): Xaa equals any of the twenty naturally occurring L-amino acids
MSEQEAQAPGGRGLPPDMLAEQVELWWSQQPRRSALCFVVAVGLVAGCGAGGVALLSTTSSRSXEWRLATGTVLCLLALLVLVKQLMSSAVQDMNCIRQAHHVALLRSGGGADALVVLLSGLVLLVTGLTLAGLAAAPAPARPLAAMLSVGIALAALGSLLLLGLLLYQVGVSGHCPSICMATPSTHSGHGGHGSIFSISGQLSAGRRHETTSSIASLI

SEQ ID NO: 2392 - protein, 100 aa, Homo sapiens
  MISC_FEATURE (40): Xaa equals any of the twenty naturally occurring L-amino acids
  MISC_FEATURE (43): Xaa equals any of the twenty naturally occurring L-amino acids
  MISC_FEATURE (90): Xaa equals any of the twenty naturally occurring L-amino acids
MQLVLCLIKMEKGVMALFLGHPSVMKFIIYFPNRPFYFIXILXVSVCLCVCMCLCVCTHLQMPVVAAGFTNLNRNKSRYPTISLQMRVRXSLSKSQVLIG

SEQ ID NO: 2393 - protein, 114 aa, Homo sapiens [sequence omitted]

SEQ ID NO: 2394 - protein, 101 aa, Homo sapiens [sequence omitted]

SEQ ID NO: 2395 - protein, 230 aa, Homo sapiens
  MISC_FEATURE (47): Xaa equals any of the twenty naturally occurring L-amino acids
  MISC_FEATURE (202): Xaa equals any of the twenty naturally occurring L-amino acids
MSCSEGFKNLFYRTYMLFKNASGKRRFLLCLLLFTVITYFFVVIGIXPIFILYELDSPLCWNEVFIGYGSALGSASFLTSFLGIWLFSYCMEDIHMAFIGIFTTMTGMAMTAFASTTLMMFLARVPFLFTIVPFSVLRSMLSKVVRSTEQGTLFACIAFLETLGGVTAVSTFNGIYSATVAWYPGFTFLLSAGLLLLPAISXCVVKCTSWNEGSYELLIQEESSEDASDR

SEQ ID NO: 2396 - protein, 155 aa, Homo sapiens
MPIYFAAVIVLYREQEVLDCDCDMASVHHLLSQIPQDLPYETLISRAGDLFVQFPPSELAREAAAQQQAERTAASTFKDFELASAQQRPDMVLRQRFRGLLRPEDRTKDVLTKPRTNRFVKLAVMGLTVALGAAALAVVKSALEWAPKFQLQLFP

SEQ ID NO: 2397 - protein, 107 aa, Homo sapiens
MASGAARWLVLAPVRSGALRSGPSLRKDGDVSAAWSGSGRSLVPSRSVIVTRSGAILPKPVKMSFGLLRVFSIVIPFLYVGTLISKNFAALLEEHDIFVPEDDDDDD

SEQ ID NO: 2398 - protein, 170 aa, Homo sapiens
MAIHHRAGQPAQQSDLINVAQLTAQYYVLKPEAGNAEHAVKFGTSGHRGSAARHSFNEPHILAIAQAIAEERAKNGITGPCYVGKDTHALSEPAFISVLEVLAANGVDVIVQENNGFTPTPAVSNAILVHNKKGGPLADGIVITPSHNPPEDGGIKYNPPNGGPADTNVT

SEQ ID NO: 2399 - protein, 503 aa, Homo sapiens
MNVIDHVRDMAAAGLHSNVRLLSSLLLTMSNNNPELFSPPQKYQLLVYHADSLFHDKEYRNAVSKYTMALQQKKALSKTSKVRPSTGNSASTPQSQCLPSEIEVKYKMAECYTMLKQDKDAIAILDGIPSRQRTPKINMMLANLYKKAGQERPSVTSYKEVLRQCPLALDAILGLLSLSVKGAEVASMTMNVIQTVPNLDWLSVWIKAYAFVHTGDNSRAISTICSLEKKSLLRDNVDLLGSLADLYFRAGDNKNSVLKFEQAQMLDPYLIKGMDVYGYLLAREGRLEDVENLGCRLFNISDQHAEPWVVSGCHSFYSKRYSRALYLGAKAIQLNSNSVQALLLKGAALRNMGRVQEAIIHFREAIRLAPCRLDCYEGLIECYLASNSIREAMVMANNVYKTLGANAQTLTLLATVCLEDPVTQEKAKTLLDKALTQRPDYIKAVVKKAELLSREQKYEDGIALLRNALANQSDCVLHRILGDFLVAVNEYQEAMDQYSIALR

SEQ ID NO: 2400 - protein, 368 aa, Homo sapiens
  MISC_FEATURE (150): Xaa equals any of the twenty naturally occurring L-amino acids
MSFLIDSSIMITSQILFFGFGWLFFMRQLFKDYEIRQYVVQVIFSVTFAFSCTMFELIIFEILGVLNSSSRYFHWKMNLCVILLILVFMVPFYIGYFIVSNIRLLHKQRLLFSCLLWLTFMYFFWKLGDPFPILSPKHGILSIEQLISRXGVIGVTLMALLSGFGAVNCPYTYMSYFLRNVTDTDILALERRLLQTMDMIISKKKRMAMARRTMFQKGEVHNKPSGFWGMIKSVTTSASGSENLTLIQQEVDALEELSRQLFLETADLYATKERIEYSKTFKGKYFNFLGYFFSIYCVWKIFMATINIVFDRVGKTDPVTRGIEITVNYLGIQFDVKFWSQHISFILVGIIIVTSIRGLLITLTKVIL

SEQ ID NO: 2401 - protein, 347 aa, Homo sapiens
MQYETPGFLPNKRIHRAMGLAALEVMQAVQRTWTNSKVRMNGKTRLMQWRDMFDIAVKWRRIADPDQPVLWLDQMPARSLSRGFNNHINLIRGQVINMRYLEYFEKILHFIKDRILVYHGANNPKGLLEVREALEKVHKVEDLLPIMKQFNTKTKDGFTVNTKVPSLKDQGKEYDGFTITITGDKVGNILFSVETQTTEERTQLYHAEIDALYKDLTAKGKVLILSSEFGEADAVCNLILSLVYYFYNLMPLSRGSSVIAYSVIVGALMASGKEVAGKIPKGKLVDFEAMTAPGSEAFSKVAKSWMNLKSISPSYKTLPSVSETFPTLRSMIEVLNTDSSPRCLKKL

SEQ ID NO: 2402 - protein, 563 aa, Homo sapiens
  MISC_FEATURE (95): Xaa equals any of the twenty naturally occurring L-amino acids
  MISC_FEATURE (538): Xaa equals any of the twenty naturally occurring L-amino acids
MVSTVECALKHVSDWLDETNKGTKTEGETEVKKDEAGENYSKDQGGRTLCGVMRIGLVAKGLLIKDDMDLELVLMCKDKPTETLLNTVKDNLPIXIQKLTEEKYQVEQCVNEASIIIRNTKEPTLTLKVILTSPLIRDELEKKDGENVSMKDPPDLLDRQKCLNALASLRHAKWFQARANGLKSCVIVLRILRDLCNRVPTWAPLKGWPLELICEKSIGTCNRPLGAGEALRRVMECLASGILLPGGPGLHDPCERDPTDALSYMTIQQKEDITHSAQHALRLSAFGQIYKVLEMDPLPSSKPFQKYSWSVTDKEGAGSSALKRPFEDGLGDDKDPNKKMKRNLRKILDSKAIDLMNALMRLNQIRPGLQYKLLSQSGPVHAPVFTMSVDVDGTTYEASGPSKKTAKLHVAVKVLQAMGYPTGFDADIECMSSDEKSDNESKNETVSSNSSNNTGNSTTETSSTLEVRTQGPILTASGKNPVMELNEKRRGLKYELISETGGSHDKRFVMEVEVDGQKFRGAGPNKKVAKASAALAAXGRNCFLDPMRQIIRKRRLSLRQRAL

SEQ ID NO: 2403 - protein, 434 aa, Homo sapiens
MQESGCRLEHPSATKFRNHVMEGDWDKAENDLNELKPLVHSPHAIVVRGALEISQTLLGIIVRMKFLLLQQKYLEYLEDGKVLEALQVLRCELTPLKYNTERIHVLSGYLMCSHAEDLRAKAEWEGKGTASRSKLLDKLQTYLPPSVMLPPRRLQTLLRQAVELQRDRCLYHNTKLDNNLDSVSLLIDHVCSRRQFPCYTQQILTEHCNEVWFCKFSNDGTKLATGSKDTTVIIWQVDPDTHLLKLLKTLEGHAYGVSYIAWSPDDNYLVACGPDDCSELWLWNVQTGELRTKMSQSHEDSLTSVAWNPDGKRFVTGGQRGQFYQCDLDGNLLDSWEGVRVQCLWCLSDGKTVLASDTHQRIRGYNFEDLTDRNIVQEDHPIMSFTISKNGRLALLNVATQGVHLWDLQDRVLVRKYQGVTQGFYTIHCMFWRP

SEQ ID NO: 2404 - protein, 318 aa, Homo sapiens
  MISC_FEATURE (32): Xaa equals any of the twenty naturally occurring L-amino acids
  MISC_FEATURE (33): Xaa equals any of the twenty naturally occurring L-amino acids
METRYNLKSPAVKRLMKEAAELKDPTDHYHAXXLEDNLFEWHFTVRGPPDSDFDGGVYHGRIVLPPEYPMKPPSIILLTANGRFEVGKKICLSISGHHPETWQPSWSIRTALLAIIGFMPTKGEGAIGSLDYTPEERRALAKKSQDFCCEGCGSAMKDVLLPLKSGSDSSQADQEAKELARQISFKAEVNSSGKTISESDLNHSFSLTDLQDDIPTTFQGATASTSYGLQNSSAASFHQPTQPVAKNTSMSPRQRRAQQQSQRRLSTSPDVIQGHQPRDNHTDHGGSAVLIVILTLALAALIFRRIYLANEYIFDFEL

SEQ ID NO: 2405 - protein, 469 aa, Homo sapiens
MRQISQDFSELSTQLTGVARDLQEEMLPGSSEDWLEPPGAVGRPATEPPREGTTEGDEEDATEAWRLHQKHVFVLSEAGKPVYSRYGSEEALSSTMGVMVALVSFLEADKNAIRSIHADGYKVVFVRRSPLVLVAVARTRQSAQELAQELLYIYYQILSLLTGAQLSHIFQQKQNYDLRRLLSGSERITDNLLQLMARDPSFLMGAARCLPLAAAVRDTVSASLQQARARSLVFSILLARNQLVALVRRKDQFLHPIDLHLLFNLISSSSSFREGEAWTPVCLPKFNAAGFFHAHISYLEPDTDLCLLLVSTDREDFFAVSDCRRRFQERLRKRGAHLALREALRTPYYSVAQVGIPDLRHFLYKSKSSGLFTSPEIEAPYTSEEEQERLLGLYQYLHSRAHNASRPLKTIYYTGPNENLLAWVTGAFELYMCYSPLGTKASAVSAIHKLMRWIRKEEDRLFILTPLTY

SEQ ID NO: 2406 - protein, 189 aa, Homo sapiens
  MISC_FEATURE (18): Xaa equals any of the twenty naturally occurring L-amino acids
  MISC_FEATURE (111): Xaa equals any of the twenty naturally occurring L-amino acids
MTRNTSTAPAHWSGSPWXTNIAYWLHPRTSAQIHLLGNIVIWVSGSLALAIYALLSLWYLLRRRRNVHDLPQDAWLRWVLAGALCAGGWAVNYLPFFLMEKTLFLYHYLPXLHLPNPSAPCGPAAHQRPPVQVPAPEEIFSALVVAWYSSACHVSNTLRPLTYGDKSLSPHELKALRWKDSWDILIRKH

SEQ ID NO: 2407 - protein, 105 aa, Homo sapiens
MFISNLFLILCFLFRPTKTTVMYLIHLYQVLKYLDKSKYFVFSFFLLSILLTTVKRCSILIWSVLRRKTMKAELVCATQSKPLLFFWKDGVMFFKDSNKYPAVIS

SEQ ID NO: 2408 - protein, 455 aa, Homo sapiens
MTTMAAATLLRATPHFSGLAAGRTFLLQGLLRLLKAPALPLLCRGLAVEAKKTYVRDKPHVNVGTIGHVDHGKTTLTAAITKILAEGGGAKFKKYEEIDNAPEERARGITINAAHVEYSTAARHYAHTDCPGHADYVKNMITGTAPLDGCILVVAANDGPMPQTREHLLLARQIGVEHVVVYVNKADAVQDSEMVELVELEIRELLTEFGYKGEETPVIVGSALCALEGRDPELGLKSVQKLLDAVDTYIPVPARDLEKPFLLPVEAVYSVPGRGTVVTGTLERGILKKGDECELLGHSKNIRTVVTGIEMFHKSLERAEAGDNLGALVRGLKREDLRRGLVMVKPGSIKPHQKVEAQVYILSKEEGGRHKPFVSHFMPVMFSLTWDMACRIILPPEKELAMPGEDLKFNLILRQPMILEKGQRFTLRDGNRTIGTGLVTNTLAMTEEEKNIKWG

SEQ ID NO: 2409 - protein, 492 aa, Homo sapiens
  MISC_FEATURE (397): Xaa equals any of the twenty naturally occurring L-amino acids
  MISC_FEATURE (398): Xaa equals any of the twenty naturally occurring L-amino acids
  MISC_FEATURE (399): Xaa equals any of the twenty naturally occurring L-amino acids
MGGRRGPNRTSYCRNPLCEPGSSGGSSGSHTSSASVTSVRSRTRSSSGTGLSSPPLATQTVVPLQHCKIPELPVQASILFELQLFFCQLIALFVHYINIYKTVWWYPPSHPPSHTSLNFHLIDFNLLMVTTIVLGRRFIGSIVKEASQRGKVSLFRSILLFLTRFTVLTATGWSLCRSLIHLFRTYSFLNLLFLCYPFGMYIPFLQLNCDLRKTSLFNHMASMGPREAVSGLAKSRDYLLTLRETWKQHTRQLYGPDAMPTHACCLSPSLIRSEVEFLKMDFNWRMKEVLVSSMLSAYYVAFVPVWFVKNTHYYDKRWSCELFLLVSISTSVILMQHLLPASYCDLLHKAAAHLGCWQKVDPALCSNVLQHPWTEECMWPQGVLVKHSKNVYKAVGXXXVAIPSDVSHFRFHFFFSKPLRILNILLLLEGAVIVYQLYSLMSSEKWHQTISLALILFSNYYAFFKLLRDRLVLGKAYSYSASPQRDLDHRFS

SEQ ID NO: 2410 - protein, 175 aa, Homo sapiens
  MISC_FEATURE (168): Xaa equals any of the twenty naturally occurring L-amino acids
  MISC_FEATURE (173): Xaa equals any of the twenty naturally occurring L-amino acids
MEAVVNLYQEVMKHADPRIQGYPLMGSPLLMTSILLTYVYFVLSLGPRIMANRKPFQLRGFMIVYNFSLVALSLYIVYEFLMSGWLSTYTWRCDPVDYSNSPEALRMVRVAWLFLFSKFIELMDTVIFILRKKDGQVTFLHVFITLCFLELVVGGKDCPGRNGLFPCXDNSPXMS

SEQ ID NO: 2411 - protein, 138 aa, Homo sapiens
  MISC_FEATURE (53): Xaa equals any of the twenty naturally occurring L-amino acids
  MISC_FEATURE (130): Xaa equals any of the twenty naturally occurring L-amino acids
  MISC_FEATURE (131): Xaa equals any of the twenty naturally occurring L-amino acids
MAGPLWRTAAFVQRHRTGLLVGSCAGLFGVPVSYHLFPDPVVQWLYQYWPQGXPAPLPPQLQSLFQEVLQDIGVPSGHCYKPFTTFTFQPVSAGFPRLPAGAVVGIPASFLGDLVINTNHPVVIHGHTVXXRSQQAPG

SEQ ID NO: 2412 - protein, 326 aa, Homo sapiens
MTFFQVTLFAVNEFILLNLLKVKDAGGSMTIHTFGAYFGLTVTRILYRRNLEQSKERQNSVYQSDLFAMIGTLFLWMYWPSFNSAISYHGDSQHRAAINTYCSLAACVLTSVAISSALHKKGKLDMVHIQNATLAGGVAVGTAAEMMLMPYGALIIGFVCGIISTLGFVYLTPFLESRLHIQDTCGINNLHGIPGIIGGIVGAVTAASASLEVYGKEGLVHSFDFQGFNGDWTARTQGKFQIYGLLVTLAMALMGGIIVGLILRLPFWGQPSDENCFEDAVYWEMPEGNSTVYIPEDPTFKPSGPSVPSVPMVSPLPMASSVPLVP

SEQ ID NO: 2413 - protein, 126 aa, Homo sapiens
MLILRGVKKEDKTLAVGIQFMFLRILAWMPSPVIHGSAIDTTCVHWALSCGRRAVCRYYNNDLLRNRFIGLQFFFKTGSVICFALVLAVLRQQDKEARTKESRSSPAVEQQLLVSGPGKKPEDSRV

SEQ ID NO: 2414 - protein, 258 aa, Homo sapiens
MDGIIEQKSMLVHSKISDAGKRNGLINTRNLMAESRDGLVSVYPAPQYQSHRVGASTVPASLDSSRSEPMQQLLDPNTLQQSVESRYRPNIILYSEGVLRSWGDGVAADCCETTFIEDRSPTKDSLEYPDGKFIDLSADDIKIHTLSYDVEEEEEFQELESDYSSDTESEDNFLMMPPRDHLGLSVFSMLCCFWPLGIAAFYLSHETNKAVAKGDLHQASTSSRRALFLAVLSITIGTGVYVGVAVALIAYLSKNNHL

SEQ ID NO: 2415 - protein, 463 aa, Homo sapiens
  MISC_FEATURE (71): Xaa equals any of the twenty naturally occurring L-amino acids
  MISC_FEATURE (84): Xaa equals any of the twenty naturally occurring L-amino acids
  MISC_FEATURE (98): Xaa equals any of the twenty naturally occurring L-amino acids
  MISC_FEATURE (383): Xaa equals any of the twenty naturally occurring L-amino acids
  MISC_FEATURE (384): Xaa equals any of the twenty naturally occurring L-amino acids
MSGPESSPPIGGPCEAAPSSSLPTPPQQPFIARRHIELGVTGGGSPENGDGALLAITPPAVKRRRGRPPKXNRSPADAGRGVDXAPSSTLKGKTNGAXPVPGPETLIVADPVLEPQLIPGPQPLGPQPVHRPNPLLSPVEKRRRGRPPKARDLPIPGTISSAGDGNSESRTQPPPHPSPLTPLPPLLVCPTATVANTVTTVTISTSPPKRKRGRPPKNPPSPRPSQLPVLDRDSTSVLESCGLGRRRQPQGQGESEGSSSDEDGSRPLTRLARLRLEAEGMRGRKSGGSMVVAVIQDDLDLADSGPGGLELTPPVVSLTPKLRSTRLRPGSLVPPLETEKLPRKRAGAPVGGSPGLAKRGRLQPPSPLGPEGSVEESEAEAQXXRRKGMGPHADVLAPAGLLGPPTKGTSASCAAAPLPPWLALLLVTEAATRREWAAPPPRLSTVATPSMTRPDSVNHYLKS

SEQ ID NO: 2416 - protein, 126 aa, Homo sapiens
MYAGSCALAIDSVGNGCAVRRLGWPHVPCSADRMPTQMKRIHGSGHPVSSACHGWEFVGIEPNLVLQSSWDTSSVQHTFSYILPLISKVPKALHSVTLFLLLHSQISYAKFNCVLLLEVFRVFIFC

SEQ ID NO: 2417 - protein, 757 aa, Homo sapiens
MPALPLDQLQITHKDPKTGKLRTSPALHPEQKADRYFVLYKPPPKDNIPALVEEYLERATFVANDLDWLLALPHDKFWCQVIFDETLQKCLDSYLRYVPRKFDEGVASAPEVVDMQKRLHRSVFLTFLRMSTHKESKDHFISPSAFGEILYNNFLFDIPKILDLCVLFGKGNSPLLQKMIGNIFTQQPSYYSDLDETLPTILQVFSNILQHCGLQGDGANTTPQKLEERGRLTPSDMPLLELKDIVLYLCDTCTTLWAFLDIFPLACQTFQKHDFCYRLASFYEAAIPEMESAIKKRRLEDSKLLGDLWQRLSHSRKKLMEIFHIILNQICLLPILESSCDNIQGFIEEFLQIFSSLLQEKRFLRDYDALFPVAEDISLLQQASSVLDETRTAYILQAVESAWEGVDRRKATDAKDPSVIEEPNGEPNGVTVTAEAVSQASSHPENSEEEECMGAAAAVGPAMCGVELDSLISQVKDLLPDLGEGFILACLEYYHYDPEQVINNILEERLAPTLSQLDRNLDREMKPDPTPLLTSRHNVFQNDEFDVFSRDSVDLSRVHKGKSTRKEENTRSLLNDKRAVAAQRQRYEQYSVVVEEVPLQPGESLPYHSVYYEDEYDDTYDGNQVGANDADSDDELISRRPFTIPQVLRTKVPREGQEEDDDDEEDDADEEAPKPDHFVQDPAVLREKAEARRMAFLAKKGYRHDSSTAVAGSPRGHGQSRETTQERRKKEANKATRANHNRRTMADRKRSKGMIPS

SEQ ID NO: 2418 - protein, 152 aa, Homo sapiens
MRSLLHLLGLKLFRGAGTVYPRDTPISLLPKWILRQAPSPCSPSLFCLPLTALFHVSSFCLKKAFPGCTSSEGAAYLPQAGGGRGLGQAPTCLPARLLQASGLAEPPEPRPVSSPSGSLNFQGSQGVLLRSQSPALCLQPWKGVCTCLCVCG

SEQ ID NO: 2419 - protein, 121 aa, Homo sapiens
  MISC_FEATURE (16): Xaa equals any of the twenty naturally occurring L-amino acids
  MISC_FEATURE (25): Xaa equals any of the twenty naturally occurring L-amino acids
MELLSALSLGELALSXSRVPLFPVXDLSYFIVSILYLKYEPGAVELSRRHPIASWLCAMLHCFGSYILADLLLGEPLIDYFSNNSSILLASAVWYLIFFCPLDLFYKCVCFPACETHLPWP

SEQ ID NO: 2420 - protein, 142 aa, Homo sapiens
MAAVVAATALKGRGARNARVLRGILAGATANKASHNRTRALQSHSSPEGKEEPEPLSPELEYIPRKRGKNPMKAVGLAWAIGFPCGILLFILTKREVDKDRVKQMKARQNMRLSNTGEYESQRFRASSQSAPSPDVGSGVQT

SEQ ID NO: 2421 - protein, 105 aa, Homo sapiens
  MISC_FEATURE (37): Xaa equals any of the twenty naturally occurring L-amino acids
  MISC_FEATURE (67): Xaa equals any of the twenty naturally occurring L-amino acids
  MISC_FEATURE (72): Xaa equals any of the twenty naturally occurring L-amino acids
  MISC_FEATURE (79): Xaa equals any of the twenty naturally occurring L-amino acids
  MISC_FEATURE (95): Xaa equals any of the twenty naturally occurring L-amino acids
  MISC_FEATURE (100): Xaa equals any of the twenty naturally occurring L-amino acids
MIFWWHRCCLSHSWYNCRVCADSWPPASPILSGPSLXCSPVLQGPRCFPLPPRCRLWLAVAAALGSXFSAVXWGSLCAXCVLGNTVVVKGSSFFXVQPLXSHNPS

SEQ ID NO: 2422 - protein, 101 aa, Homo sapiens [sequence omitted]

SEQ ID NO: 2423 - protein, 197 aa, Homo sapiens
MNIHFRGKTKSFPEEKDGASSCLGKSLGSEDSRNMKEKLEDMESVLKDLTEEKRKDVLNSLAKCLGKEDIRQDLEQRVSEVLISGELHMEDPDKPLLSSLFNAAGVLVEARAKAILDFLDALLELSEEQQFVAEALEKGTLPLLKDQVKSVMEQNWDELASSPPDMDYDPEARILCALYVVVSILLELAEGPTSVSS

SEQ ID NO: 2424 - protein, 170 aa, Homo sapiens
MKLLKLRRNIVKLSLYRHFTNTLILAVAASIVFIIWTTMKFRIVTCQSDWRELWVDDAIWRLLFSMILFVIMVLWRPSANNQRFAFSPLSEEEEEDEQKEPMLKESFEGMKMRSTKQEPNGNSKVNKAQEDDLKWVEENVPSSVTDVALPALLDSDEERMITHFERSKME

SEQ ID NO: 2425 - protein, 155 aa, Homo sapiens [sequence omitted]

SEQ ID NO: 2426 - protein, 163 aa, Homo sapiens
MDSPEVTFTLAYLVFAVCFVFTPNEFHAAGLTVQNLLSGWLGSEDAAFVPFHLRRTAATLLCHSLLPLGYYVGMCLAASEKRLHALSQAPEAWRLFLLLAVTLPSIACILIYYWSRDRWACHPLARTLALYALPQSGWQAVASSVNTEFRRIDNLPPVHQVPV

SEQ ID NO: 2427 - protein, 127 aa, Homo sapiens
MVQIAAAAVHQPRDQGISRRPGAGHGAAQRTGAIVQIDRLVAVLFDQALHIGRDDVVGFFPANALEFAFTARPDSFHRIFQAVRIVDTATHGTPTQAGANLVQAVVIVIAGIVRFDIFDFTVHDVHT

SEQ ID NO: 2428 - protein, 196 aa, Homo sapiens
  MISC_FEATURE (9): Xaa equals any of the twenty naturally occurring L-amino acids
  MISC_FEATURE (11): Xaa equals any of the twenty naturally occurring L-amino acids
  MISC_FEATURE (13): Xaa equals any of the twenty naturally occurring L-amino acids
  MISC_FEATURE (19): Xaa equals any of the twenty naturally occurring L-amino acids
  MISC_FEATURE (187): Xaa equals any of the twenty naturally occurring L-amino acids
MGCRANASXIXRXAWYQKXYPGPGTQAHSRMASGLTLRRLRRAEDEDAAPGWSQTLRTCPAQGLRATGLASYGMRGSWHRSPLPAVVLPSVLQTALSPLALCQAWRRAVPHGVPSQRLRNQEASLVPKGVPRAWYPGPLQNGLWTHLEKGELLGLKPTPGGLLLLRSFWDPHPSRPFLCTLLPPPLXIFPPLRCSA

SEQ ID NO: 2429 - protein, 342 aa, Homo sapiens
  MISC_FEATURE (126): Xaa equals any of the twenty naturally occurring L-amino acids
  MISC_FEATURE (152): Xaa equals any of the twenty naturally occurring L-amino acids
  MISC_FEATURE (183): Xaa equals any of the twenty naturally occurring L-amino acids
  MISC_FEATURE (209): Xaa equals any of the twenty naturally occurring L-amino acids
MRSSCVLLTALVALAAYYVYIPLPGSVSDPWKLMLLDATFRGAQQVSNLIHYLGLSHHLLALNFIIVSFGKKSAWSSAQVKVTDTDFDGVEVRVFEGPPKPEEPLKRSVVYIHGGGWALASAKIRXYDELCTAMAEELNAVIVSIEYRLVPXVYFPEQIHDVVRATKYFLKPEVLQKYMVDPXRICISGDSAGGNLAAALGQQFTQDAXLKNKLKLQALIYPVLQALDFNTPSYQQNVNTPILPRYVMVKYWVDYFKGNYDFVQAMIVNNHTSLDVEEAAAVRARLNWTSLLPASFTKNYKPVVQTTGNAGLSRSFLSCWMPAPPHSLQTRQCCSSSQRPTF

SEQ ID NO: 2430 - protein, 128 aa, Homo sapiens
  MISC_FEATURE (107): Xaa equals any of the twenty naturally occurring L-amino acids
  MISC_FEATURE (118): Xaa equals any of the twenty naturally occurring L-amino acids
  MISC_FEATURE (121): Xaa equals any of the twenty naturally occurring L-amino acids
MCLRAIMNYQSGFSLVMNHPACVNEIALSLNNKNPRTKALVLELLAAVCLVRGGHDIILAAFDNFKEVCGEQHRFEKLMEYFRNEDSNIDFMVACMQFINIVVHSVXNMNFRVFCIMXSPXWAWTCTW

SEQ ID NO: 2431 - protein, 154 aa, Homo sapiens
MGSLSGLRLAAGSCFRLCERDVSSSLRLTRSSDLKRINGFCTKPQESPGAPSRTYNRVPLHKPTDWQKKILIWSGRFKKEDEIPETVSLEMLDAAKNKMRVKISYLMIALTVVGCIFMVIEGKKAAQRHETLTSLNLEKKARLKEEAAMKAKTE

SEQ ID NO: 2432 - protein, 189 aa, Homo sapiens
  MISC_FEATURE (138): Xaa equals any of the twenty naturally occurring L-amino acids
  MISC_FEATURE (178): Xaa equals any of the twenty naturally occurring L-amino acids
  MISC_FEATURE (180): Xaa equals any of the twenty naturally occurring L-amino acids
MDPECAQLLPALCAVLVDPRQPVADDTCLEKLLDWFKTVTEGESSVVLLQEHPCLVELLSHVLKVQDLSSGVLSFSLRLAGTFAAQENCFQYLQQGELLPGLFGEPGPLGRATWAVPTVRSGWIQGLRSLAQHPSALXFLADHGAVDTIFSLQGDSSLFVASAASQLLVHVLALSMRXGXEGQPCLPGG

SEQ ID NO: 2433 - protein, 238 aa, Homo sapiens
  MISC_FEATURE (146): Xaa equals any of the twenty naturally occurring L-amino acids
  MISC_FEATURE (151): Xaa equals any of the twenty naturally occurring L-amino acids
  MISC_FEATURE (228): Xaa equals any of the twenty naturally occurring L-amino acids
MAADGQCSLPASWRPVTLTHVEYPAGDLSGHLLAYLSLSPVFVIVGFVTLIIFKRELHTISFLGGLALNEGVNWLIKNVIQEPRPCGGPHTAVGTKYGMPSSHSQFMWFFSVYSFLFLYLRMHQTNNARFLDLLWRHVLSLGLLAXAFLVXYSRVYLLYHTWSQVLYGGIAGGLMAIAWFIFTQEVLTPLFPRIAAWPVSEFFLIRDTSLIPNVLWFEYTVTRAEARXRQRKLGTKLQ

SEQ ID NO: 2434 - protein, 110 aa, Homo sapiens
MVDLWHPNVAAAERRLLISSLLRDDESISHAGVGEKGRGGAWADCGPVQSLPVLFPCSETCLSGKLLFGILYHVGSLFPLVIVNGNFSACISLDFFFFLPIICFRDSFLA

SEQ ID NO: 2435 - protein, 233 aa, Homo sapiens
  MISC_FEATURE (104): Xaa equals any of the twenty naturally occurring L-amino acids
  MISC_FEATURE (107): Xaa equals any of the twenty naturally occurring L-amino acids
  MISC_FEATURE (175): Xaa equals any of the twenty naturally occurring L-amino acids
  MISC_FEATURE (195): Xaa equals any of the twenty naturally occurring L-amino acids
  MISC_FEATURE (231): Xaa equals any of the twenty naturally occurring L-amino acids
MAEAASPHLSLPSGLLELCALLGAPRDSLRSLEQVAYKKGVKHLSALLDPEVLSIFVPPFISKEDSQTAGANCGTLGKTRMRSLRKKREKPRPEQWKGLPGPPXAPXPEDVAVPGGVDLLTLPQLCFPGGVCVATEPKEDCVHFLVLTDVCGNRTYGVVAQYYRPLHDEYCFYNXKTHRECPGCFVPFAVCVVSXFPYYNSLKDCLSCLLALLKPCKDFEVDSHIKDFAAXCL

SEQ ID NO: 2436 - protein, 137 aa, Homo sapiens
MKSPTCWICTCSWAAPSPRPTPQGALRCGRCGWHAGSGATECGGHQQTFPCTTVCLALCWALGALPAGAIICEKEHCMATEGQQLRQPKTETFEQGLEGCAGVRQQSQAGQDLSWQLSCCCFHVFWVQRSWLHRSEP

SEQ ID NO: 2437 - protein, 138 aa, Homo sapiens
  MISC_FEATURE (51): Xaa equals any of the twenty naturally occurring L-amino acids
  MISC_FEATURE (56): Xaa equals any of the twenty naturally occurring L-amino acids
  MISC_FEATURE (57): Xaa equals any of the twenty naturally occurring L-amino acids
  MISC_FEATURE (136): Xaa equals any of the twenty naturally occurring L-amino acids
MPRPEVTRPGPSSLPSTIPLRLRAPGHPASPSDGREDGCTELAGRAGPAGXGGLGXXREMLSVGLGFLRTELGLDLGLEPKRYPGWVILVGTGALGLLLLFLLGYGWARLARRPQKARSPPRKREEAAAVPAAVPXDL

SEQ ID NO: 2438 - protein, 143 aa, Homo sapiens
  MISC_FEATURE (39): Xaa equals any of the twenty naturally occurring L-amino acids
MTQLRQVLESRLQRPLPEDLAEALASGVILCQLANQLRXRSVPFIHVPSPAVPKLSALKARKNVESFLEACRKMGVPEADLCSPSDLLQGTARGLRTALEAVKRVGGKALPPLWPPSGLGGFVVFYVVLMLLLYVTYTRLLGS

SEQ ID NO: 2439 - protein, 114 aa, Homo sapiens
METKVGICLRSNLLHPFSPSSLSALFKARILSMRTPLWTTERFSLSLTSSLSLLLSPPPPPSLSSSSLCPHPIAFFFLLFLFPILTQDCFTVSQVKFKLLEDFSTERQWLTCKT

SEQ ID NO: 2440 - protein, 125 aa, Homo sapiens
  MISC_FEATURE (118): Xaa equals any of the twenty naturally occurring L-amino acids
MAEFPSKVSTRTSSPAQGAEASVSALRPDLGFVRSRLGALMLLQLVLGLLVWALIADTPYHLYPAYGWVMFVAVFLWLVTIVLFNLYLFQLHMKLYMVPWPLVLMIFNISGTVLYITXFIGCSAA

SEQ ID NO: 2441 - protein, 147 aa, Homo sapiens [sequence omitted]

SEQ ID NO: 2442 - protein, 120 aa, Homo sapiens
MMPSRTNLATGIPSSKVKYSRLSSTDDGYIDLQFKKTPPKIPYKAIALATVLFLIGAFLIIIGSLLLSGYISKGGADRAVPVLIIGILVFLPGFYHLRIAYYASKGYRGYSYDDIPDFDD

SEQ ID NO: 2443 - protein, 218 aa, Homo sapiens
MVSWMICRLVVLVFGMLCPAYASYKAVKTKNIREYVRWMMYWIVFALFMAAEIVTDIFISWFPFYYEIKMAFVLWLLSPYTKGASCFTASLSTRPCPAMRRRSTRTSCRPRSAATRPCSASGSGASTLPPPLLCRLPPRVRGRWPAGCGASPCRTCAPSLTHLPLPTMTPSTWRTRCPTGGHPLGTGPGACRTATPRMSVGQILRQSPGRQPGPERSP

SEQ ID NO: 2444 - protein, 116 aa, Homo sapiens
  MISC_FEATURE (36): Xaa equals any of the twenty naturally occurring L-amino acids
  MISC_FEATURE (44): Xaa equals any of the twenty naturally occurring L-amino acids
  MISC_FEATURE (48): Xaa equals any of the twenty naturally occurring L-amino acids
MVMWFPGWLLGRGRAGSSRSCLSVLSSVCFPTTQPXAWMVPSVXLILXCPGFSTEIICVGSLSVPGQPEQLVAPCLTYLSNCLQGMAHQRGCGTLSLPSLVSFTVKSGKGLLVGVR

SEQ ID NO: 2445 - protein, 336 aa, Homo sapiens
MLTWRAEQEGGMQFWVSSESKLSDSWQPRSLDIEVAAYALLSHFLQFQTSEGIPIMRWLSRQRNSLGGFASTQDTTVALKALSEFAALMNTERTNIQVTVTGPSSPSPVKFLIDTHNRLLLQTAELAVVQPMAVNISANGFGFAICQLNVVYNVKASGSSRRRRSIQNQEAFDLDVAVKENKDDLNHVDLNVCTSFSGPGRSGMALMEVNLLSGFMVPSEAISLSETVKKVEYDHGKLNLYLDSVNETQFCVNIPAVRNFKVSNTQDASVSIVDYYEPRRQAVRSYNSEVKLSSCDLCSDVQGCRPCEDGASGSHHHSSVIFIFCFKLLYFMELWL

SEQ ID NO: 2446 - protein, 300 aa, Homo sapiens
  MISC_FEATURE (21): Xaa equals any of the twenty naturally occurring L-amino acids
MSNPSAPPPYEDRNPLYPGPXPPGGYGQPSVLPGGYPAYPGYPQPGYGHPAGYPQPMPPTHPMPMNYGPGHGYDGEERAVSDSFGPGEWDDRKVRHTFIRKVYSIISVQLLITVAIIAIFTFVEPVSAFVRRNVAVYYVSYAVFVVTYLILACCQGPRRRFPWNIILLTLFTFAMGFMTGTISSMYQTKAVIIAMIITAVVSISVTIFCFQTKVDFTSCTGLFCVLGIVLLVTGIVTSIVLYFQYVYWLHMLYAALGAICFTLFLAYDTQLVLGNRKHTISPEDYITGALQIYTDIIYIF

SEQ ID NO: 2447 - protein, 156 aa, Homo sapiens
MQIQVAGLLQFAVPLFSTAEEDLLAIQLLLNSSESSLHQLTAMVDCRGLHKDYLDALAGICYDGLQGLLYLGLFSFLAALAFSTMICAGPRAWKHFTTRNRDYDDIDDDDPFNPQAWRMAAHSPPRGQLHSFCSYSSGLGSQTSLQPPAQTISNAP

SEQ ID NO: 2448 - protein, 137 aa, Homo sapiens
  MISC_FEATURE (135): Xaa equals any of the twenty naturally occurring L-amino acids
  MISC_FEATURE (137): Xaa equals any of the twenty naturally occurring L-amino acids
MSMAVETFGFFMATVGLLMLGVTLPNSYWRVSTVHGNVITTNTIFENLWFSCATDSLGVYNCWEFPSMLALSGYIQACRALMITAILLGFLGLLLGIAGLRCTNIGGLELSRKAKLAANAGPFQILGRYLRDGGXSX

SEQ ID NO: 2449 - protein, 343 aa, Homo sapiens
MQPPPPGPLGDCLRDWEDLQQDFQNIQETHRLYRLKLEELTKLQNNCTSSITRQKKRLQELALALKKCKPSLPAEAEGAAQELENQMKERQGLFFDMEAYLPKKNGLYLSLVLGNVNVTLLSKQAKFAYKDEYEKFKLYLTIILILISFTCRFLLNSRVTDAAFNFLLVWYYCTLTIRESILINNGSRIKGWWVFHHYVSTFLSGVMLTWPDGLMYQKFRNQFLSFSMYQSFVQFLQYYYQSGCLYRLRALGERHTMDLTVEGFQSWMWRGLTFLLPFLFFGHFWQLFNALTLFNLAQDPQCKEWQVLMCGFPFLLLFLGNFFTTLRVVHHKFHSQRHGSKKD

SEQ ID NO: 2450 - protein, 210 aa, Homo sapiens
MAPLAGAMMLTLLLLCWCCFPGKAMQYHTGVQTPEWKPRLVWSCLGLYIVFLTALEFKQELWGLVIVAAGFALLARRVVLSVDWTLLLVFMAMFIDVHLLTQLPALQGVLGNVSHLSEPGLWLTAIGLSQVISNVPSTILLLNYVPPSLLLVWAVNVGGFGLLPGSLANLIALRMANDRRIWWRFHLYSIPMLLWAALVGYVLLVILPAN

SEQ ID NO: 2451 - protein, 183 aa, Homo sapiens
  MISC_FEATURE (154): Xaa equals any of the twenty naturally occurring L-amino acids
  MISC_FEATURE (182): Xaa equals any of the twenty naturally occurring L-amino acids
MSQIYGLIHGDLCFIPNVYAALFTAALVPLTCLVVVFVVFIHAYQVKPQWKAYDDVFRGRTNAAEIPLILYLFALISVTWLWGGLHMAYRHFWMLVLFVIFNSLQGLYVFMVYFILHNQMCCPMKASYTVEMNGHPGPSTAFFTPGSGMPPAGXEISKSTQNLNRWYGGRCHLTGREHPSKXG

SEQ ID NO: 2452 - protein, 173 aa, Homo sapiens [sequence omitted]

SEQ ID NO: 2453 - protein, 146 aa, Homo sapiens
  MISC_FEATURE (135): Xaa equals any of the twenty naturally occurring L-amino acids
  MISC_FEATURE (141): Xaa equals any of the twenty naturally occurring L-amino acids
MDYGCAQEAEGRMCEDFQDEDHDSASPDTSFSPYDGDLTTTSSSLFIDSLTTEDDTKLNPYAGGDGLQNNLSPKTKGTPVHLGTIVGIVLAVLLVAAIILAGIYINGHPTSNAALFFIERRPHHWPAMKFPQHLXIPPMRXWSLGP

SEQ ID NO: 2454 - protein, 123 aa, Homo sapiens
MSSGGSPGCLRLAEGCPNHRAWVRWNRRQPHSAFLIASHLFLSVLVWFNSFQGLELESENPRHLLWNVCLVVLVCPSSSLACRFQVYQRTFCSVESHRTKRKILQLFANILPYLYKQPYTKKH

SEQ ID NO: 2455 - protein, 136 aa, Homo sapiens
  MISC_FEATURE (78): Xaa equals any of the twenty naturally occurring L-amino acids
  MISC_FEATURE (135): Xaa equals any of the twenty naturally occurring L-amino acids
  MISC_FEATURE (136): Xaa equals any of the twenty naturally occurring L-amino acids
MMGHEVKVPLLENFYADYYTTASIALVSCLAMCVVVRFLGRKGRLLLFMILTALASLLQLGLLNLIGKYSQHPDSGMXDSVKDKFSIAFSIVGHVCLPCGGDLSVFFCAEITPTVIKVLPAWAGSCHPGLPAFLXX

SEQ ID NO: 2456 - protein, 221 aa, Homo sapiens
  MISC_FEATURE (96): Xaa equals any of the twenty naturally occurring L-amino acids
  MISC_FEATURE (165): Xaa equals any of the twenty naturally occurring L-amino acids
MAASRPLSRFWEWGKNIVCVGRNYADHVREMRSAVLSEPVLFLKPSTAYAPEGSPILMPAYTRNLHHELELGVVMGKRCRAVPEAAAMDYVGGYAXCLDMTARDVQDECKKKGLPWTLAKSFTASCPVSAFVPKEKIPDPHKLKLWLKVNGELRQEGETSSMIFXIPYIISYVSKIITLEEGDIILTGTPKGVGPVKENDEIEAGIHGLVSMTFKVEKPEY

SEQ ID NO: 2457 - protein, 152 aa, Homo sapiens
MELPAVNLKVILLGHWLLTTWGCIVFSGSYAWANFTILALGVWAVAQRDSIDAISMFLGGLLATIFLDIVHISIFYPRVSLTDTGRFGVGMAILSLLLKPLSCCFVYHMYRERGGFLGSSQDRSAYQTIDSAEAPADPFAVPEGRSQDARGY

SEQ ID NO: 2458 - protein, 136 aa, Homo sapiens
MEDHINPNCHGRWLKATEVNYHDSGATIRFSSSWGDGEIESHLMGAFNVSNLLLALATLLALGYPLADLLKTAARLQPVCGRMEVFTAPGKPTVVVDYAHTPDALEKPYRRRVCTVRASCGVSLAVVAIAIKVSVH

SEQ ID NO: 2459 - protein, 181 aa, Homo sapiens
  MISC_FEATURE (151): Xaa equals any of the twenty naturally occurring L-amino acids
  MISC_FEATURE (175): Xaa equals any of the twenty naturally occurring L-amino acids
MPHSSLHPSIPCPRGHGAQKAALVLLSACLVTLWGLGEPPEHTLRYLVLHLASLQLGLLLNGVCSLAEELRHIHSRYRGSYWRTVRACLGCPLRRGALLLLSIYFYYSLPNAVGPPFTWMLALLGLSQALNILLGLKGLAPAEISAVCEKXNFNVAHGLAWSYYIGYLRLILPKXQGRIRT

SEQ ID NO: 2460 - protein, 109 aa, Homo sapiens
  MISC_FEATURE (6): Xaa equals any of the twenty naturally occurring L-amino acids
MAYVFXGAYVPLSCRIIEQVLERRSWQGLDEVVRLLNCSDFAFTDMTKEDKASSESLRLILVVFLGGCTFSEISALRFLGREKGYRFIFLTTAVTNSARLMEAMSEVKA

SEQ ID NO: 2461 - protein, 197 aa, Homo sapiens
MEPLCNGNLPTSMHTLDHLHGVSNRASLHYTGESQLTEVLQNLGKDQYPQQSLEQIGTRIAKVLEKNQTSWVLSSMAALYWRVKGQGKKAIDCLRQALHYAPHQMKDVPLISLANILHNAKLWNDAVIVATMAVEIAPHFAVNHFTLGNVYVAMEEFEKALVWYESTLKLQPEFVPAKNRIQTIQCHLMLKKGRRSP

SEQ ID NO: 2462 - protein, 108 aa, Homo sapiens
  MISC_FEATURE (50): Xaa equals any of the twenty naturally occurring L-amino acids
  MISC_FEATURE (53): Xaa equals any of the twenty naturally occurring L-amino acids
MLGSLFFCLSVCEWPVCFFNWSEWHLAHPHSHLKHCGKSSPSISSNSTTXHIXKNSLGLDFIMVLAAILCILSRRNIPPSAPTLSLTFRSGSSSKLSVLKASSMITSH

SEQ ID NO: 2463 - protein, 149 aa, Homo sapiens
MRREDPALVELTRPRRSSLSTSVRAWGSWWLLTMGDAGEVAQGSAHVSPCSSRVIFLMFGSWSLFPLAFHPHGAETVAPGSRKGIEVGRQKSLDCSLFWETYMLRSTEIQETKALLSRAILWLFLEAQECGCKRKGAGGRSGGQGCSLC

SEQ ID NO: 2464 - protein, 175 aa, Homo sapiens
  MISC_FEATURE (110): Xaa equals any of the twenty naturally occurring L-amino acids
  MISC_FEATURE (117): Xaa equals any of the twenty naturally occurring L-amino acids
  MISC_FEATURE (127): Xaa equals any of the twenty naturally occurring L-amino acids
  MISC_FEATURE (170): Xaa equals any of the twenty naturally occurring L-amino acids
MPVTVTRTTITTTTTSSSGLGSPMIVGSPRALTQPLGLLRLLQLVSTCVAFSLVASVGAWTGSMGNWSMFTWCFCFSVTLIILIVELCGLQARFPLSWRNFPITFACYAXLFCLSAXIIYPTTYVQXLSHGRSRDHAIAAPSSPASRVWLTPPKWPGPGPGPARSLAIWXPYPGC

SEQ ID NO: 2465 - protein, 398 aa, Homo sapiens
MRKRTEPVALEHERCAAAGSSSSGSAAAALDADCRLKQNLRLTGPAAAEPRCAADAGMKRALGRRKGVWLRLRKILFCVLGLYIAIPFLIKLCPGIQAKLIFLNFVRVPYFIDLKKPQDQGLNHTCNYYLQPEEDVTIGVWHTVPAVWWKNAQGKDQMWYEDALASSHPIILYLHGNAGTRGGDHRVELYKVLSSLGYHVVTFDYRGWGDSVGTPSERGMTYDALHVFDWIKARSGDNPVYIWGHSLGTGVATNLVRRLCERETPPDALILESPFTNIREEAKSHPFSVIYRYFPGFDWFFLDPITSSGIKFANDENVKHISCPLLILHAEDDPVVPFQLGRKLYSIAAPARSFRDFKVQFVPFHSDLGYRHKYIYKSPELPRILREFLGKSEPEHQH

SEQ ID NO: 2466 - protein, 189 aa, Homo sapiens
MQATATTLDHEQEYTPINSRNKVLVASLIGTAIEFFDFYIYATAAVIVFPHIFFPQGDPTAATLQSLATFAIAFVARPIGSAVFGHFGDRVGRKATLVASLLTMGISTVVIGLLPGYATIGIFAPLLLALARFGQGLGLGGPVPNSPYSESYYNSLAVVLQRRDWENPGVTQLNRLADIPFRQAGVIAK

SEQ ID NO: 2467 - protein, 113 aa, Homo sapiens
MAGPAAAFRRLGALSGAAALGFASYGAHGAQFPDAYGKELFDKANKHHFLHSLALLGVPHCRKPLWAGLLLASGTTLFCTSFYYQALSGDPSIQTLAPAGGTLLLLGWLALAL

SEQ ID NO: 2468 - protein, 127 aa, Homo sapiens
MRQRELQVGIPVADEAGQRLGYSVTAAKQGIFQVVISRICMAIPAMAIPPLIMDTLEKKDFLKRRPWLGAPLQVGLVGFCLVFATPLCCALFPQKSSIHISNLEPELRAQIHEQNPSVEVVYYNKGL

SEQ ID NO: 2469 - protein, 271 aa, Homo sapiens
  MISC_FEATURE (214): Xaa equals any of the twenty naturally occurring L-amino acids
MHCFSIMVTPDPSTPSRLACHVMHLSSHRLDEYWDRQRNRHRMVKVDPETRYMSLAVCELDQPGLGPLVAAACSDGAVRLFLLQDSGRILQLLAETFHHKRCVLKVHSFTHEAPNQRRRLLLCSAATDGSLAFWDLTTMLDHDSTVLEPPVDPGLPYRLGTPSLTLQAHSCGINSLHTLPTREGHHLVASGSEDGSLHVFVLAVEMLQLEEAVXEAGLVPQLRVLEEYSVPCAHAAHVTGLKILSPSIMVSAFIDQRLTFWRLGHGEPTFM

SEQ ID NO: 2470 - protein, 201 aa, Homo sapiens
  MISC_FEATURE (9): Xaa equals any of the twenty naturally occurring L-amino acids
  MISC_FEATURE (53): Xaa equals any of the twenty naturally occurring L-amino acids
  MISC_FEATURE (57): Xaa equals any of the twenty naturally occurring L-amino acids
  MISC_FEATURE (128): Xaa equals any of the twenty naturally occurring L-amino acids
MDADLLIDXLADLRDSEVAAHLLQVCCYHLPLMQVELPISLLTRLALMDPTSXNQFXNTVSASPRTIVSFLSVALLSDQPLLTSDLLSLLAHTARVLSPSHLSFIQELLAGSDESYRPLRSSWATQRXLCGHTLIGSWDTCSNTAWPCVGHCRASLDCSAFCCLGLETRILLCGAVPALLWAMQPTRLVLWDLPWQLQCPV

SEQ ID NO: 2471 - protein, 123 aa, Homo sapiens
  MISC_FEATURE (64): Xaa equals any of the twenty naturally occurring L-amino acids
  MISC_FEATURE (90): Xaa equals any of the twenty naturally occurring L-amino acids
MKPRWGSAPEVSSFLPLIAFPTSLSFPYSHQSAVWGSCPCPLLTFPFVSFPSSTRSIFLILLGXMVCWFTCISHSKTMAKILCNYLLSKXICSCSLSFYSSDVNHFYFLTLKENAFIILKKIN

SEQ ID NO: 2472 - protein, 183 aa, Homo sapiens
  MISC_FEATURE (127): Xaa equals any of the twenty naturally occurring L-amino acids
  MISC_FEATURE (163): Xaa equals any of the twenty naturally occurring L-amino acids
MSCQLLVNAEGTDCLEAKEKVHVIGNRLKLLLKEVSRHIKELEKLLDVSSSQQDLSSWSSADELDTSGSVSPTSGRSTPNRQKTPRGKCSLSQPGPSVSSPHSRSTKGGSDSSLSEPGPGRSGRGFXFRVLRAALPLQLLLLLLIGLACLVPMSEEDYSCALXNNFARSFHPMLRYTNGPPPL

SEQ ID NO: 2473 - protein, 279 aa, Homo sapiens
  MISC_FEATURE (266): Xaa equals any of the twenty naturally occurring L-amino acids
MEAVVNLYQEVMKHADPRIQGYPLMGSPLLMTSILLTYVYFVLSLGPRIMANRKPFQLRGFMIVYNFSLVALSLYIVYEFLMSGWLSTYTWRCDPVDYSNSPEALRMVRVAWLFLFSKFIELMDTVIFILRKKDGQVTFLHVFHHSVLPWSWWWGVKIAPGGMGSFHAMINSSVHVIMYLYYGLSAFGPVAQPYLWWKKHMTAIQLIQFVLVSLHISQYYFMSSCNYQYPVIIHLIWDVWHHLLHAVLQLLVSLLYQGQAAAPCTXQNGAPGIAKVKAN

SEQ ID NO: 2474 - protein, 153 aa, Homo sapiens
  MISC_FEATURE (75): Xaa equals any of the twenty naturally occurring L-amino acids
MEAVVNLYQEVMKHADPRIQGYPLMGSPLLMTSILLTYVYFVLSLGPRIMANRKPFQLRGFMIVYNFSLVALSLXASLELVVGGKDCPGRNGLFPCHDKLFRACHNVPVLRIICLWPCGTTLPLVEKAHDSHSADPVCPGLTAHLPVLLYVQL

SEQ ID NO: 2475 - protein, 223 aa, Homo sapiens
  MISC_FEATURE (88): Xaa equals any of the twenty naturally occurring L-amino acids
  MISC_FEATURE (95): Xaa equals any of the twenty naturally occurring L-amino acids
  MISC_FEATURE (102): Xaa equals any of the twenty naturally occurring L-amino acids
  MISC_FEATURE (187): Xaa equals any of the twenty naturally occurring L-amino acids
  MISC_FEATURE (189): Xaa equals any of the twenty naturally occurring L-amino acids
  MISC_FEATURE (204): Xaa equals any of the twenty naturally occurring L-amino acids
MFYLANVCGCAVSLLGLVESVLDVFGADATGPSGLRVLPQGYGWNLLYGSLLLGLVGGVCTLGAGLYARASFLTFLLVSGSLASVLIXFVAVGPXDIRLTPXPGPNGSSLPPRFGHFTGFNSSTLKDNLGAGYAEDYTTGAVMNFASVFAVLFNGCTGIMAGANMSGELKDPSRAIPLGTIVAVAYXFXVYVLLFFSQFTCDRXCCKKIWGLRGNKLLAPTGV

SEQ ID NO: 2476 - protein, 112 aa, Homo sapiens
  MISC_FEATURE (82): Xaa equals any of the twenty naturally occurring L-amino acids
  MISC_FEATURE (100): Xaa equals any of the twenty naturally occurring L-amino acids
MPPSWIQWWSTSNWRQPLQRLLWGLEGILYLLLALMLCHALFTTGSHLLSSLWPVVAAVWRHLLPALLLLVLSALPALLFTXSFLLLFSTLLSLVGLLTXMTHPGDTQDLDQ

SEQ ID NO: 2477 - protein, 176 aa, Homo sapiens
  MISC_FEATURE (153): Xaa equals any of the twenty naturally occurring L-amino acids
  MISC_FEATURE (162): Xaa equals any of the twenty naturally occurring L-amino acids
  MISC_FEATURE (166): Xaa equals any of the twenty naturally occurring L-amino acids
  MISC_FEATURE (176): Xaa equals any of the twenty naturally occurring L-amino acids
MAPRGKRLSSTPLEILFFLNGWYNATYFLLELFIFLYKGVLLPYPTANLVLDVVMLLLYLGIEVIRLFFGTKGNLCQRKMPLSISVALTFPSAMMASYYLLLQTYVLRLEAIMNGILLFFCGFSSAQTFGQATQHKASGYHLLNQDHQPKRLXYTSSIGRGXGIPXLALFKNSPLX

SEQ ID NO: 2478 - protein, 107 aa, Homo sapiens
  MISC_FEATURE (14): Xaa equals any of the twenty naturally occurring L-amino acids
  MISC_FEATURE (40): Xaa equals any of the twenty naturally occurring L-amino acids
  MISC_FEATURE (42): Xaa equals any of the twenty naturally occurring L-amino acids
  MISC_FEATURE (43): Xaa equals any of the twenty naturally occurring L-amino acids
  MISC_FEATURE (89): Xaa equals any of the twenty naturally occurring L-amino acids
  MISC_FEATURE (91): Xaa equals any of the twenty naturally occurring L-amino acids
  MISC_FEATURE (94): Xaa equals any of the twenty naturally occurring L-amino acids
  MISC_FEATURE (99): Xaa equals any of the twenty naturally occurring L-amino acids
MYNSRGPTLSNYVXKCAPRKSLKVQPRFTWVISGQKDQAXFXXSSYSSVLLSFSILSVSFGMLMQVGNFTLPRIYGLIHASVALTMLSXQXLLXHTCSXHLLQGEGT

SEQ ID NO: 2479 - protein, 314 aa, Homo sapiens
  MISC_FEATURE (26): Xaa equals any of the twenty naturally occurring L-amino acids
  MISC_FEATURE (48): Xaa equals any of the twenty naturally occurring L-amino acids
  MISC_FEATURE (204): Xaa equals any of the twenty naturally occurring L-amino acids
  MISC_FEATURE (251): Xaa equals any of the twenty naturally occurring L-amino acids
MATAVSRPCAGRSRDILWRVLGWRIXASIVWSVLFLPICTTVFIIFSXIDLFHPIQWLSDSFSDLYSSYVIFYFLLLSVVIIIISIFNVEFYAVVPSIPCSRLALIGKIIHPQQLMHSFIHAAMGMVMAWCAAVITQGQYSFLVVPCTGTNSFGSPAAQTCLNEYHLFFLLLEHLWAIAIASCILVQHELSPFPIIQQYKFLRXRRSLLLLVKHSCVESLFLVRNFCILYYFLGYIPKAWISTAMNLHIDXQVHRPLDTVSGLLKSLVTLPCPGWCGVFLLTTWYVSWILFKIYATEAHVFSWFKPPFGKKGVR

SEQ ID NO: 2480 - protein, 124 aa, Homo sapiens
  MISC_FEATURE (15): Xaa equals any of the twenty naturally occurring L-amino acids
  MISC_FEATURE (100): Xaa equals any of the twenty naturally occurring L-amino acids
MNWQHSTMYLFFAVXGIVDMLTYLVSHVPLGVDRLVMAVAVFMEGFLFYYHVHNRPPLDQHIHSLLLYALFGGCVSISLEVIFRDHIVLELFRTSLIILXGNLVLADWVCAVPTFWNTRMGPEG

SEQ ID NO: 2481 - protein, 217 aa, Homo sapiens
  MISC_FEATURE (161): Xaa equals any of the twenty naturally occurring L-amino acids
MYQTQVSDAGLYRCMVTAWSPVRGSLWREAATSLSNPIEIDFQTSGPIFNASVHSDTPSVIRGDLIKLFCIITVEGAALDPDDMAFDVSWFAVHSFGLDKAPVLLSSLDRKGIVTTSRRDWKSDLSLERVSVLEFLLQVHGSEDQDFGNYYCSVTPWVKSXTGSWQKEAEIHSKPVFITVKMDVLNAFKYPLLIGVGLSTVIGLLSCLIGYCSSHWC

SEQ ID NO: 2482 - protein, 147 aa, Homo sapiens
  MISC_FEATURE (120): Xaa equals any of the twenty naturally occurring L-amino acids
MELGRNRPCASSRGPSSFPPSLHGRPLEPPCCTELWAPPICNVTLKFLVLFLCCNVNTGFLDFFFLMGVLGGTDGVREAPPWLVEGTGTCMAALSLPPLPGCKPEVCAAGRGCSGLGLQXRCPGQGTLMHRPNPGLGRTCPLTASCL

SEQ ID NO: 2483 - protein, 168 aa, Homo sapiens
  MISC_FEATURE (73): Xaa equals any of the twenty naturally occurring L-amino acids
  MISC_FEATURE (77): Xaa equals any of the twenty naturally occurring L-amino acids
  MISC_FEATURE (125): Xaa equals any of the twenty naturally occurring L-amino acids
  MISC_FEATURE (126): Xaa equals any of the twenty naturally occurring L-amino acids
  MISC_FEATURE (138): Xaa equals any of the twenty naturally occurring L-amino acids
  MISC_FEATURE (151): Xaa equals any of the twenty naturally occurring L-amino acids
  MISC_FEATURE (161): Xaa equals any of the twenty naturally occurring L-amino acids
MVPMHLLGRLEKPLLLLCCASFLLGLALLGIKTDITPVAYFFLTLGGFFLFAYLLVRFLEWGLRSQLQSMQTXSPGXSGNARDNEAFEVPVYEEAVVGLESQCRPKSWTNHPPTATGGDTPSTLXXEQPSPFQKGSRXKPKLGTEAEWALXGGPMGPRKGXPWEELPN

SEQ ID NO: 2484 - protein, 317 aa, Homo sapiens
MQDEQPSDSFQGQAAQSGVWNDDRLLGPSQNFEAESIQDNAHMAEGTGFYPSEPMLCSESVEGQVPHSLETLYQSADCSDANDALIVLIHLLMLESGYIPQGTEAKALSMPEKWKLSGVYKLQYMHPLCEGSSATLTCVPLGNLIVVNATLKINNEIRSVKRLQLLPESFICKEKLGENVANIYKDLQKLSRLFKDQLVYPLLAFTRQALNLPDVFGLVVLPLELKLRIFRLLDVRSVLSLSAVCRDLFTASNDPLLWRFLYLRDFRDNTVRVQDTDWKELYRKRHIQRKESPKGRVCDAPAIVNSHHSILSQPLAP

SEQ ID NO: 2485 - protein, 462 aa, Homo sapiens
  MISC_FEATURE (115): Xaa equals any of the twenty naturally occurring L-amino acids
MRLRVRLLKRTWPLEVPETEPTLGHLRSHLRQSLLCTWGYSSNTRFTITLNYKDPLTGDEETLASYGIVSGDLICLILQDDIPAPNIPSSTDSEHSSLQNNEQPSLATSSNQTSXQDEQPSDSFQGQAAQSGVWNDDSMLGPSQNFEAESIQDNAHMAEGTGFYPSEPMLCSESVEGQVPHSLETLYQSADCSDANDALIVLIHLLMLESGYIPQGTEAKALSMPEKWKLSGVYKLQYMHPLCEGSSATLTCVPLGNLIVVNALNLPDVFGLVVLPLELKLRIFRLLDVRSVLSLSAVCRDLFTASNDPLLWRFLYLRDFRDNTVRVQDTDWKELYRKRHIQRKESPKGRFVMLLPSSTHTIPFYPNPLHPRPFPSSRLPPGIIGGEYDQRPTLPYVGDPISSLIPGPGETPSQFPPLRPRFDPVGPLPGPNPILPGRGGPNDRFPFRPSRGRPTDGRLSFM

SEQ ID NO: 2486 - protein, 113 aa, Homo sapiens
MFVAVFLWLVTIVLFNLYLFQLHMKLYMVPWPLVLMIFNISATVLYITAFIACSAAVDLTSLRGTRPYNQRAAASFFACLVMIAYGVSAFFSYQAWRGVGSNAATSQMAGGYA

SEQ ID NO: 2487 - protein, 338 aa, Homo sapiens
  MISC_FEATURE (318): Xaa equals any of the twenty naturally occurring L-amino acids
MRTRKLKLAVLNSFFNLECCVSGTHSMDLVALAPFGEYTVLPGLDCTFSKGYQGLTNCMMAALPEDTVVFEKPVKTIHWNGSFQEAAFPGETFPVSVECEDGDRFPAHHVIVTVPLGFLREHLDTFFDPPLPAEKAEAIRKIGFGTNNKIFLEFEEPFWEPDCQLIQLVWEDTSPLEDAAPELQDAWFRKLIGFVVLPAFASVHVLCGFIAGLESEFMETLSDEEVLLCLTQVLRRVTGNPRLPAPKSVLRSRWHSAPYTRGSYSYVAVGSTGGDLDLLAQPLPADGAGAQLQILFAGEATHRTFYSTTHGALLSGWXEADRLLSLWAPQVQQPRPRL

SEQ ID NO: 2488 - protein, 195 aa, Homo sapiens
  MISC_FEATURE (181): Xaa equals any of the twenty naturally occurring L-amino acids
  MISC_FEATURE (189): Xaa equals any of the twenty naturally occurring L-amino acids
  MISC_FEATURE (190): Xaa equals any of the twenty naturally occurring L-amino acids
  MISC_FEATURE (193): Xaa equals any of the twenty naturally occurring L-amino acids
MLFFLVSVIYKKFQLGCAIGHNETAMESEALVGLPSQGLNSSCEAQMFTVDSQMSYTVPIMAFAFVCHPEVLPIYTELCRPSKRRMQAVANVSIGAMFCMYGLTATFGYLTFYSSVKAEMLHMYSQKDPLILCVRLAVLLAVTLTVPVVLFPIRRALQQLLFPGKAFSWPRHVAIALILLXLVNVLASXXQPXGI

SEQ ID NO: 2489 - protein, 208 aa, Homo sapiens
  MISC_FEATURE (204): Xaa equals any of the twenty naturally occurring L-amino acids
  MISC_FEATURE (207): Xaa equals any of the twenty naturally occurring L-amino acids
MDILDVLTLAAQELSRPGCLGRTPQPGSPSPNTPCLPEAAVSQPGSAVASDWRVVVEERIRSKTQRLSKGGPRQGPAGSPSRFNSVAGHFFFPLLQRFDRPLVTFDLLGEDQLVLGRLAHTLGALMCLAVNTTVAVAMGKALLEFVWALRFHIDAYVRQGLLSAVSSVLLSLPAARLLEDLMDELLEARSWLADVAEKDPDEDXRRXH

SEQ ID NO: 2490 - protein, 133 aa, Homo sapiens
  MISC_FEATURE (64): Xaa equals any of the twenty naturally occurring L-amino acids
  MISC_FEATURE (91): Xaa equals any of the twenty naturally occurring L-amino acids
MRTAGRGSCRTHWAFPTACSSCTVCGCPLSRTAPPSCWPCWPLMSSLSSSPPSSPKPGESIMAXVALGPAESSSHERLPMVLKVPRLRVSXLTLCSQPFSILGFGDIVVPGFLVAYCCRFDVQVCSRQIYFVA

SEQ ID NO: 2491 - protein, 278 aa, Homo sapiens
  MISC_FEATURE (85): Xaa equals any of the twenty naturally occurring L-amino acids
  MISC_FEATURE (106): Xaa equals any of the twenty naturally occurring L-amino acids
  MISC_FEATURE (156): Xaa equals any of the twenty naturally occurring L-amino acids
  MISC_FEATURE (235): Xaa equals any of the twenty naturally occurring L-amino acids
  MISC_FEATURE (277): Xaa equals any of the twenty naturally occurring L-amino acids
MTHAFFKALLFLASGSVILACHHEQNIFKMGGLRKSIPLVYLCFLVGGAALSALPLVTAGFFSKDEILAGAMANGHINLMVAGLXGAFMTSLYTFRMIFIVFHGKXQIHAHAVKGVTHSLPLIVLLILSTFVGALIVPPLQGVLPQTTELAHGSMXTLEITSGVVAVVGILLAAWLWLGKRTLVTSIANSAPGRLLGTWWYNAWGFDWLYDKVFVKPFLGIAWLLKRDPLNSMMXIPAVLSRFAGKGLLLSENGYLRWYVASMSIGAVVVLALLMVXR

SEQ ID NO: 2492 - protein, 209 aa, Homo sapiens
  MISC_FEATURE (209): Xaa equals any of the twenty naturally occurring L-amino acids
MDTSAVFVTTCLIAAFGSIMMGLFANLPVALAPAMGLNAFFAFVVVQAMGLPWQVGMGAIFWGAIGLLLLTIFRVRYWMIANIPVSLRVGITSGIGLFIGMMGLKNAGVIVANPETLVSIGNLTSHSVLLGILGFFIIAILASRNIHAAVLVSIVVTTLLGWMLGDVHYNGIVSAPPSVMTVVGHVDLAGSFNLGLAEGPGSIPVGTPX

SEQ ID NO: 2493 - protein, 251 aa, Homo sapiens
  MISC_FEATURE (191): Xaa equals any of the twenty naturally occurring L-amino acids
  MISC_FEATURE (216): Xaa equals any of the twenty naturally occurring L-amino acids
  MISC_FEATURE (217): Xaa equals any of the twenty naturally occurring L-amino acids
  MISC_FEATURE (250): Xaa equals any of the twenty naturally occurring L-amino acids
MDNSWRLGPAIGLSAGQSQLLVSLLLLLTRVQPGTDVAAPEHISYVPQLSNDTLAGRLTLSTFTLEQPLGQFSSHNISDLDTIWLVVALSNATQSFTAPRTNQDIPAPANFSQRGYYLTLRANRVLYQTRGQLHVLRVGNDTHCQPTKIGCNHPLPGPGPYRVKFLVMNDEGPVAETKWSSDTRLQQAQAXRAVPGPQSPGTWFIIAILSILLAVXXRSLAVLIYTGLLLPKFFWGFGMDRRQQQKHVDXW

SEQ ID NO: 2494 - protein, 493 aa, Homo sapiens
  MISC_FEATURE (24): Xaa equals any of the twenty naturally occurring L-amino acids
  MISC_FEATURE (477): Xaa equals any of the twenty naturally occurring L-amino acids
  MISC_FEATURE (479): Xaa equals any of the twenty naturally occurring L-amino acids
  MISC_FEATURE (482): Xaa equals any of the twenty naturally occurring L-amino acids
  MISC_FEATURE (488): Xaa equals any of the twenty naturally occurring L-amino acids
MPTLEGWVVLWQQKAAEALTPTQXAQGETEPTEQAPDALEQAADTSRRNAETPEATTQQETDTDLPEAPPPPLEPAVIARPGCVNLSLHGIVEDRRPKERISFEVMVLAELFLEMLQRDFGYRVYKMLLSLPEKVVSPPEPEKEEAAKEEATKEEEAIKEEVVKEPKDEAQNEGPATESEAPLKEDGLLPKPLSSGGEEEEKPRGEASEDLCEMALDPELLLLRDDGEEEFAGAKLEDSEVRSVASNQSEMEFSSLQDMPKELDPSAVLPLDCLLAFVFFDANWCGYLHRRDLERILLTLGIRLSAEQAKQLVSRVVTQNICQYRSLQYSRQEGLDGGLPEEVLFGNLDLLPPPGKSTKPGAAPTEHKALVSHNGSLINVGSLLQRAEQQDSGRLYLENKIHTLELKLEESHNRFSATEVTNKTLAAEMQELRVRLAEAEETARTAERQKSQLQRLLQELRRRLTPLQLEIQRVVEXVXWVXRRQHNXLTNAL

SEQ ID NO: 2495 - protein, 107 aa, Homo sapiens
  MISC_FEATURE (101): Xaa equals any of the twenty naturally occurring L-amino acids
  MISC_FEATURE (104): Xaa equals any of the twenty naturally occurring L-amino acids
  MISC_FEATURE (105): Xaa equals any of the twenty naturally occurring L-amino acids
  MISC_FEATURE (107): Xaa equals any of the twenty naturally occurring L-amino acids
MSLVAYVINSLVNICLIGTQNLFSLVLALWDAVTGPLWRMTDVVAAFLAHISSSAVAMAILLWTPCQLALELLASAARLLASFVLVNLTGLVLLACVLAVXVLXXIX

SEQ ID NO: 2496 - protein, 130 aa, Homo sapiens
  MISC_FEATURE (33): Xaa equals any of the twenty naturally occurring L-amino acids
  MISC_FEATURE (116): Xaa equals any of the twenty naturally occurring L-amino acids
  MISC_FEATURE (129): Xaa equals any of the twenty naturally occurring L-amino acids
MAAFLAHISSSAVAMAILLWTPCQLALELLASXARLLASFVLVNLTGLVLLACVLAVTVTVLHPDFTLRLATQALSQLHARPSYHRLREDVMRLSRLALGSEAWRRVWSRICSWRXGQTGEGHWSSPGXL

SEQ ID NO: 2497 - protein, 240 aa, Homo sapiens
MQTTYVLQSLHLRIPEISNITTTPHTLPAAWLTMFDAVLILLLIPLKDKLVDPILRRHGLLPSSLKRIAVGMFFVMCSAFAAGILESKRLNLVKEKTINQTIGNVVYHAADLSLWWQVPQYLLIGISEIFASIAGLEFAYSAAPKSMQSAIMGLFFFFSGVGSFVGSGLLALVSIKAIGWMSSHTDFGNINGCYLNYYFFLLAAIQGATLLLFLIISVKYDHHRDHQRSRANGVPTSRRA

SEQ ID NO: 2498 - protein, 238 aa, Homo sapiens
MALVPCQVLRMAILLSYCSILCNYKAIEMPSHQTYGGSWKFLTFIDLVIQAVFFGICVLTDLSSLLTRGSGNQEQERQLKKLISLRDWMLAVLAFPVGVFVVAVFWIIYAYDREMIYPKLLDNFIPGWLNHGMHTTVLPFILIEMRTSHHQYPSRSSGLTAICTFSVGYILWVCWVHHVTGMWVYPFLEHIGPGARIIFFGSTTILMNFLYLLGEVLNNYIWDTQKSMEEEKEKPKLE

SEQ ID NO: 2499 - protein, 140 aa, Homo sapiens
  MISC_FEATURE (89): Xaa equals any of the twenty naturally occurring L-amino acids
MKLGNTGAMRRCVKLTVALETAECEFPPHLDVYIEDPHLPPSLGLLPGARVHFSQLEKRVSRSHNVYCCFRSSTYVQVLSFPPETTISXPLPHIYLAELLQGGQSPFQATASCISLCLQPSALLGVCLLYQHLPAVFSQG

SEQ ID NO: 2500 - protein, 287 aa, Homo sapiens
MEFNPSDHPRASTIFLSKSQTDVREKRKSLFINHHPPGQIARKYSSCSTIFLDDSTVSQPNLKYTIKCVALAIYYHIKNRDPDGRMLLDIFDENLHPLSKSEVPPDYDKHNPEQKQIYRFVRTLFSAAQLTAECAIVTLVYLERLLTYAEIDICPANWKRIVLGAILLASKVWDDQAVWNVDYCQILKDITVEDMNELERQFLELLQFNINVPSSVYAKYYFDLRSLAEANNLSFPLEPLSRERAHKLEAISRLCEDKYKDLRRSARKRSASADNLTLPRWSPAIIS

SEQ ID NO: 2501 - protein, 166 aa, Homo sapiens
  MISC_FEATURE (113): Xaa equals any of the twenty naturally occurring L-amino acids
  MISC_FEATURE (122): Xaa equals any of the twenty naturally occurring L-amino acids
  MISC_FEATURE (153): Xaa equals any of the twenty naturally occurring L-amino acids
MFVETLWKVWTELLDVLGLDVSNLSQYFSPASVSSSPARALLLVGVVLLAYWFLSLTLGFTFSVLHVVFGRFFWIVRVVLFSMSCVYILHKYEGEPENAVLPLCFVVAVYFMXRAHGLLLAXSPSGPSNPSNPSVEEKLEHLEKQVRLLNIRXNRVLESLDRSKDK

SEQ ID NO: 2502 - protein, 320 aa, Homo sapiens
  MISC_FEATURE (106): Xaa equals any of the twenty naturally occurring L-amino acids
MTLWNGVLPFYPQPRHAAGFSVPLLIVILVFLALAASFLLILPGIRGHSRWFWLVRVLLSLFIGAEIVAVHFSAEWFVGTVNTNTSYKAFSAARVTARVGLLVGLXGINITLTGTPVHQLNETIDYNEQFTWRLKENYAAEYANALEKGLPDPVLYLAEKFTPSSPCGLYHQYHLAGHYASATLWVAFCFWLLSNVLLSTPAPLYGGLALLTTGAFALFGVFALASISSVPLCPLRLGSSALTTQYGAAFWVTLATGVLCLFLGGAVVSLQYVRPSALRTLLDQSAKDCSQERGGSPLILGDPLHKQAALPDLKCITTNL

SEQ ID NO: 2503 - protein, 330 aa, Homo sapiens
  MISC_FEATURE (137): Xaa equals any of the twenty naturally occurring L-amino acids
MVMYARKQQRLSDGCHDRRGDSQPYQGGDVLQALKYSSKSHPSSGDHRHEKMRDAGDPSPPNKMLRRSDSPENKYSDSTGHSKAKNVHTHRVRERDGGTSYSPQENSHNHSALHSSNSHSSNPSNNPSKTSDAPYDXADDWSEHISSSGKKYYYNSARDKMAVNSFPKDRDYRREVITDMKRCETPEILHHQIKCCGDLIVLKTNTVTAQVTVRPKMCILTELERGMVGPVTLHKKIHTTTVLFIVQIHILLIQAITQAKLQMHLMILQMTGLSILALLGKSTTTIVEQKFHNGKNQKSGLKENRDKKKQTRAETHSSSTPVQHPIKPVV

SEQ ID NO: 2504 - protein, 232 aa, Homo sapiens
  MISC_FEATURE (231): Xaa equals any of the twenty naturally occurring L-amino acids
MAVDIQPACLGLYCGKTLLFKNGSTEIYGECGVCPRGQRTNAQKYCQPCTESPELYDWLYLGFMAMLPLVLHWFFIEWYSGKKSSSALFQHITALFECSMAAIITLLVSDPVGVLYIRSCRVLMLSDWYTMLYNPSPDYVTTVHCTHEAVYPLYTIVFIYYAFCLVLMMLLRPLLVKKIACGLGKSDRFKSIYAALYFFPILTVLQAVGGGLLYYAFPYIKLVWGFSSRRXP

SEQ ID NO: 2505 - protein, 160 aa, Homo sapiens
  MISC_FEATURE (151): Xaa equals any of the twenty naturally occurring L-amino acids
MACLGLYCGKTLLFKNGSTEIYGECGVCPRGQRTNAQKYCQPCTESPELYDWLYLGFMAMLPLVLHWFFIEWYSGKKSSSALFQHITALFECSMAAIITLLVSDPVGVLYIRSCRVLMLSDWYTMLYNPSPDYVTTVHCTHEAATHYIPLXLSITHSAWY

SEQ ID NO: 2506 - protein, 166 aa, Homo sapiens
  MISC_FEATURE (132): Xaa equals any of the twenty naturally occurring L-amino acids
  MISC_FEATURE (160): Xaa equals any of the twenty naturally occurring L-amino acids
MSGFENLNTDFYQTSYSIDDQSQQSYDYGGSGGPYSKQYAGYDYSQQGRFVPPDMMQPQQPYTGQIYQPTQAYTPASPQPFYGNNFEDEPPLLEELGINFDHIWQKTLTVLHPLKVADGSIMNETDLAGPMXFCLAFGATLLLAGKIQFGYVYGISAIGXLGMFGY

SEQ ID NO: 2507 - protein, 142 aa, Homo sapiens [sequence omitted]

SEQ ID NO: 2508 - protein, 545 aa, Homo sapiens
  MISC_FEATURE (419): Xaa equals any of the twenty naturally occurring L-amino acids
MLLNNGFRESDQLFKQYRNHSPLMSFGASFVSFLNAMMTFEEEKMQLACDDLKTTEKLCESEEAGVIETIKNKIKKNVDVRKSAPSMVDRLQRQIIIADCQVYLAVLSFVKQELSAYIKGGWILRKAWKIYNKCYLDINALQELYQKKLTEESLTSDAANDNHIVAEGVSEESLNRLKGAVSFGYGLFHLCISMVPPNLLKIINLLGFPGDRLQGLSSLMYASESKDMKAPLATLALLWYHTVVRPFFALDGSDNKAGLDEAKEILLKKEAAYPNSSLFMFFKGRIQRLECQINSALTSFHTALELAVDQREIQHVCLYEIGWCSMIELNFKDAFDSFERLKNESRWSQCYYAYLTAVCQGATGDVDGAQIVFKEVQKLFKRKNNQIEQFSVKKAERFRKQTPTKALCVLASIEVLYLXKALPNCSFPNLQRMSQACHEVDDSSVVGLKYLLLGAIHKCLGNSEDAVQYFQRAVKDELCRQNNLYVQPYACYELGCLLLDKPETVGRGRALLLQAKEDFSGYDFENRLHVRIHAALASLRELVPQ

SEQ ID NO: 2509 - protein, 210 aa, Homo sapiens
  MISC_FEATURE (69): Xaa equals any of the twenty naturally occurring L-amino acids
  MISC_FEATURE (79): Xaa equals any of the twenty naturally occurring L-amino acids
  MISC_FEATURE (80): Xaa equals any of the twenty naturally occurring L-amino acids
  MISC_FEATURE (126): Xaa equals any of the twenty naturally occurring L-amino acids
  MISC_FEATURE (207): Xaa equals any of the twenty naturally occurring L-amino acids
MKVNDRVAAERQHVLAFALAGGVLLLMAVVVALSFGRDAHGWTWASGALLEDLMPWRWPRIMAALFAGXMLAVAGCIIXXLTGNPMASPEVLGISSGAAFGVVLMLFLVPGNAFGWLLPAGSLGAXVTLLIIMIAAGRGGFSPHRMLLAGMALSTAFTMLLMMLQASGDPRMAQVLTWISGSTYNATDAQVWRTGIVWYFAAITPLXRAG

SEQ ID NO: 2510 - protein, 108 aa, Homo sapiens
MVLPPSSEKVKSLSQTPRVEASGRGSWQEMGLVERLLLCFHSRPVAVCSDSSHQDTIGSFCMTLPPRVFLRFSLSCLILWLFPYLFLLDCGRKKSISNLLKPVTKQQQ

SEQ ID NO: 2511 - protein, 124 aa, Homo sapiens
MFVYIVFLFGFSTAVVTLIEDGKNDSLPSESTSHRWRGPACRPPDSSYNSLYSTCLELFKFTIGMGDLEFTENYDFKAVFIILLLAYVILTYILLLNMLIALMGETVNKIAQESKNIWKLQRAI

SEQ ID NO: 2512 - protein, 376 aa, Homo sapiens
  MISC_FEATURE (285): Xaa equals any of the twenty naturally occurring L-amino acids
MDGEEQQPPHEANVEPVVPSEASEPVPRVLSGDPQNLSDVDAFNLLLEMKLKRRRQRPNLPRTVTQLVAEDGSRVYVVGTAHFSDDSKRDVVKTIREVQPDVVVVELCQYRVSMLKMDESTLLREAQELSLEKLQQAVRQNGLMSGLMQMLLLKVSAHITEQLGMAPGGEFREAFKEASKVPFCKFHLGDRPIPVTFKRAIAALSFWQKVRLAWGLCFLSDPISKDDVERCKQKDLLEQMMAEMIGEFPDLHRTIVSERDVYLTYMLRQAARRLELPRASDAEPXKCVPSVVVGVVGMGHVPGIEKNWSTDLNIQEIMTVPPPSVSGRVSRLAVKAAFFGLLGYSLYWMGRRTASLVLSLPAAQYCLQRVTEARHK

SEQ ID NO: 2513 - protein, 350 aa, Homo sapiens
  MISC_FEATURE (13): Xaa equals any of the twenty naturally occurring L-amino acids
  MISC_FEATURE (45): Xaa equals any of the twenty naturally occurring L-amino acids
  MISC_FEATURE (123): Xaa equals any of the twenty naturally occurring L-amino acids
MKKDESFLGKLGXTLARKRRAREVSDLQEEGKNAINSPMSPALAXVHPEDTQLEENEERTMIDPTSKEDPKFKELVKVLLDWINDVLVEERIIVKQLEEDLYDGQVLQKLLEKLAGCKLNVAXVTQSEIGQKQKLQTVLEAVHDLLRPRGWALRWSVDSIHGKNLVAILHLLVSLAMHFRAPIRLPEHVTVQVVVVRKREGLLHSSHISEELTTTTEMMMGRFERDAFDTLFDHAPDKLSVVKKSLITFVNKHLNKLNLEVTELETQFADGVYLVLLMGLLEDYFVPLHHFYLTPESFDQKVHNVSFAFELMLDGGLKKPKARPEDVVNLDLKSTLRVLYNLFTKYKNVE

SEQ ID NO: 2514 - protein, 198 aa, Homo sapiens
  MISC_FEATURE (31): Xaa equals any of the twenty naturally occurring L-amino acids
MAPEEKGDKDDQLNKETEDYLNSLLEGCLKXTEDSLSYEDNQDDDSDLLQDLSPEEASYSLQENLPSDESCLSLDDLAKRIEIAEVVPTEGLVSILKKRNDTVGDHPAQMQHKPSKRRVRFQEIDDSLDQDEVGGGSCILLVLLCIATVFLSVGGTALYCTFGDMESPVCTDFADNMDFYYTKLLQGVAELKHWIYLS

SEQ ID NO: 2515 - protein, 151 aa, Homo sapiens [sequence omitted]

SEQ ID NO: 2516 - protein, 307 aa, Homo sapiens
  MISC_FEATURE (33): Xaa equals any of the twenty naturally occurring L-amino acids
  MISC_FEATURE (108): Xaa equals any of the twenty naturally occurring L-amino acids
  MISC_FEATURE (216): Xaa equals any of the twenty naturally occurring L-amino acids
MAAPHHVKPKTSPKARPRHVGLGRWLGATGGAXLWIQETVPTWASRHPCSHLCCHCSKQQSLWKHLCHGHRPAVSGLQMGLCILAKRHPHTGGGCLLWTYHPRRTEPXPAHCPGWRGAQQMPRLRAFANTCPHRASVLLPCARLASPMPAGWLGPVEASSGVAPAPRLPVSSPVLSTSANSRGEAKETQGVQEVGALHPSRSFPGSSASLSHAPRXHSRQGGRQGRGVGPELSTAPSPPHHPFPFHRWGRGEGGAGWGWRVPPTTLLCLGTPTPHSPHPNILVSVPVGLACMCTYVFVTFLWKKKKK

SEQ ID NO: 2517 - protein, 139 aa, Homo sapiens
  MISC_FEATURE (118): Xaa equals any of the twenty naturally occurring L-amino acids
MIIASVVSAVQMLINAYAFGLYQSLGIFIPLIVTNCIVVGRAEAFAAKKGPALSALDGFSIGMGATCAMFVLGSLREIIGNGTLFDGADALLGSWAKVLRVEIFHTDSPFLLAMLPPXAFIGLGLMLAGKYLIDERMKS

SEQ ID NO: 2518 - protein, 478 aa, Homo sapiens
MGSAFERVVRRVVQELDHGGEFIPVTSLQSSTGFQPYCLVVRKPSSSWFWKPRYKCVNLSIKDILEPDAAEPDVQRGRSFHFYDAMDGQIQGSVELAAPGQAKIAGGAAVSDSSSTSMNVYSLSVDPNTWQTLLHERHLRQPEHKVLQQLRSRGDNVYVVTEVLQTQKEVEVTRTHKREGSGRFSLPGATCLQGEGQGHLSQKKTVTIPSGSTLAFRVAQLVIDSDLDVLLFPDKKQRTFQPPATGHKRSTSEGAWPQLPSGLSMMRCLHNFLTDGVPAEGAFTEDFQGLRAEVETISKELELLDRELCQLLLEGLEGVLRDQLALRALEEALEQGQSLGPVEPLDGPAGAVLECLVLSSGMLVPELAIPVVYLLGALTMLSETQHKLLAEALESQTLLGPLELVGSLLEQSAPWQERSTMSLPPGLLGNSWGEGAPAWVLLDECGLELGEDTPHVCWEPQPRAACVHSTPPWHCYQD

SEQ ID NO: 2519 - protein, 215 aa, Homo sapiens
MVAAALTDLDDRLAGRLRNLIITLFCFFIASASVELLFPWPWLFAIGLTLSTSGFILLGGLGQRYATIAFGALLIAIYTMLGTSLYEHWYQQPMYLLAGAVWYNVLTLIGHLLFPVRPLQDNLARCYEQLARYLELKSRMFDPDIEDQSQAPLYDLALANGLLMATLNQTKLSLLTRLRGDRGQRGTRRTLALLLCRTGYSRACQLFSYSVSNIA

SEQ ID NO: 2520 - protein, 117 aa, Homo sapiens
  MISC_FEATURE (34): Xaa equals any of the twenty naturally occurring L-amino acids
MGWAHPLLCGGGGPPALAVTILHRTVLGSLPLPXAPRSAALRLNMSARPCQCCGTPVRASDCVCRRDAGTRGCVCMCVCVRAACPPVCMVCGLGPHPWPEHFILWGRGADLVGGAPL

SEQ ID NO: 2521 - protein, 160 aa, Homo sapiens
  MISC_FEATURE (125): Xaa equals any of the twenty naturally occurring L-amino acids
MTPGNILTRPASWMAVFNAMPTICFGFQCHVSSVPVFNSMQQPEVKTWGGVVTAAMVIALAVYMGTGICGFLTFGAAVDPDVLLSYPSEDMAVAVARAFIILSVLTSYPILHFCGRAVVEGLCCXTRGCQWRRTWGGSGGGECCRRWSGSCSPCCGALHP

SEQ ID NO: 2522 - protein, 237 aa, Homo sapiens
MLFYRLVFILHETSRSTQKAIAFCLGYGCPLAISVITLGATQPREVYTRKNVCWLNWEDTKALLAFAIPALIIVVVNITITIVVITKILRPSIGDKPCKQEKSSLFQISKSIGVLTPLLGLTWGFGLTTVFPGTNLVFHIIFAILNVFQGLFILLFGCLWDLKVQEALLNKFSLSRWSSQHSKSTSLGSSTPVFSMSSPISRRFNNLFGKTGTYNVSTPEATSSSLENSSSASSLLN

SEQ ID NO: 2523 - protein, 162 aa, Homo sapiens
  MISC_FEATURE (2): Xaa equals any of the twenty naturally occurring L-amino acids
MXNASYSDSYLEGILLKGVFTCEPWSVSVGWSTSVDCGWFQSAWLRSSTEGSTGAALWQRLRREMDQPTPGTWLHGIRKGRCWPLCSCCLFLFLFAFDLVATDRVARDLVFSSRHPSTPALSQVSCCHANAMSTLAPRPKSVQRWPTSSSHYSLNSMYHLPL

SEQ ID NO: 2524 - protein, 333 aa, Homo sapiens
MSQCCRKIKDTVQKLASDHKDIHSSVSRVGKAIDRNFDSEICGVVSDAVWDAREQQQQILQMAIVEHLYQQGMLSVAEELCQESTLNVDLDFKQPFLELNRILEALHEQDLGPALEWAVSHRQRLLELNSSLEFKLHRLHFIRLLAGGPAKQLEALSYARHFQPFARLHQREIQVMMGSLVYLRLGLEKSPYCHLLDSSHWAEICETFTRDACSLLGLSVESPLSVSFASGCVALPVLMNIKAVIEQRQCTGVWNHKDELPIEIELGMKCWYHSVFACPILRQQTSDSNPPIKLICGHVISRDALNKLINGGKLKCPYCPMEQNPADGKRIIF

SEQ ID NO: 2525 - protein, 583 aa, Homo sapiens
  MISC_FEATURE (356): Xaa equals any of the twenty naturally occurring L-amino acids
MAALLHTNTPSINQELCRLNTMDLLLDLFFKYTWNNFLHFQVELCIAAILSHAAREERTEASGSESRVEPPHENGNRSLETPQPAASLPDNTMVTHLFQKCCLVQRILEAWEANDHTQAAGGMRRGNMGHLTRIANAVVQNLERGPVQTHISEVIRGLPADCRGRWESFVEETLTETNRRNTVDLAFSDYQIQQMTANFVDQFGFNDEEFADQDDNINAPFDRIAEINFNIDADEDSPSAALFEACCSDRIQPFDDDEDEDIWEDSDTRCAARVMARPRFGAPHASESCSKNGPERGGQDGKASLEAHRDAPGAGAPPAPGKKEAPPVEGDSEGAMWTAVFDEPANSTPTAPGVVXDVGSSVWAAGTSAPEEKGWAKFTDFQPFCCSESGPRCSSPVDTECSHAEGSRSQGPEKAFSPASPCAWNVCVTRKAPLLASDSSSSGGSHSEDGDQKAASAMDAVSRGPGREAPPLPTVARTEEAVGRVGCADSRLLSPACPAPKEVTAAPAVAVPPEATVAITTALSKAGPAIPTPAVSSALAVAVPLGPIMAVTAAPAMVATLGTVTKDGKTDAPPEGAALNGPV

SEQ ID NO: 2526 - protein, 299 aa, Homo sapiens
  MISC_FEATURE (213): Xaa equals any of the twenty naturally occurring L-amino acids
  MISC_FEATURE (215): Xaa equals any of the twenty naturally occurring L-amino acids
  MISC_FEATURE (277): Xaa equals any of the twenty naturally occurring L-amino acids
  MISC_FEATURE (282): Xaa equals any of the twenty naturally occurring L-amino acids
  MISC_FEATURE (285): Xaa equals any of the twenty naturally occurring L-amino acids
  MISC_FEATURE (296): Xaa equals any of the twenty naturally occurring L-amino acids
  MISC_FEATURE (297): Xaa equals any of the twenty naturally occurring L-amino acids
  MISC_FEATURE (299): Xaa equals any of the twenty naturally occurring L-amino acids
MAASGEPQRQWQEEVAAVVVVGSCMTDLVSLTSRLPKTGETIHGHKFFIGFGGKGANQCVQAARLGAMTSMVCKVGKDSFGNDYIENLKQNDISTEFTYQTKDAATGTASIIVNNEGQNIIVIVAGANLLLNTEDLRAAANVISRAKVMVCQLEITPATSLEALTMARRSGVKTLFNPAPAIADLDPQFYTLSDVFCCNESEAEILTGLTVGXAXDAGEAALVLLKRGCQVVIITLGAEGCVVLSQTEPEPKHIPTEKVKAVDTTGAGDSFVGTLAXYWLTXQIXLGRHAHRSNSXXSX

SEQ ID NO: 2527 - protein, 337 aa, Homo sapiens
  MISC_FEATURE (9): Xaa equals any of the twenty naturally occurring L-amino acids
MEKSWMLWXFVERWLIALASWSWALCRISLLPLIVTFHLYGGIILLLLIFISIAGILYKFQDVLLYFPEQPSSSRLYVPMPTGIPHENIFIRTKDGIRLNLILIRYTGDNSPYSPTIIYFHGNAGNIGHRLPNALLMLVNLKVNLLLVDYRGYGKSEGEASEEGLYLDSEAVLDYVMTRPDLDKTKIFLFGRSLGGAVAIHLASENSHRISAIMVENTFLSIPHMASTLFSFFPMRYLPLWCYKNKFLSYRKISQCRMPSLFISGLSDQLIPPVMMKQLYELSPSRTKRLAIFPDGTHNDTWQCQGYFTALEQFIKEVVKSHSPEEMAKTSSNVTII

SEQ ID NO: 2528 - protein, 204 aa, Homo sapiens
  MISC_FEATURE (166): Xaa equals any of the twenty naturally occurring L-amino acids
  MISC_FEATURE (194): Xaa equals any of the twenty naturally occurring L-amino acids
  MISC_FEATURE (200): Xaa equals any of the twenty naturally occurring L-amino acids
  MISC_FEATURE (204): Xaa equals any of the twenty naturally occurring L-amino acids
MKHLGYLGYTSGLSLTCMLFFLVSVIYKKFQLGCAIGHNETAMESEALVGLPSQGLNSSCEAQMFTVDSQMSYTVPIMAFAFVCHPEVLPIYTELCRSTTSTPQALQAQDAGRGQRVHWGHVLHVWAHSNLWIPHLLQQCEGGDAAHVQPEGPAHPLCAPGRAASXVTPHCASRAGSYPPGPGSNCFSQARAFXLATTLXAISX

SEQ ID NO: 2529 - protein, 101 aa, Homo sapiens
MCICIYHAAGVSFMLLSPGEVTSTIKGGSEMASGFLGVGQGPAGGFPSRCTEGSAEPTVCRGCVPRALPRPPPALASALQGGVPILGAVCHAHLTQVCVPV

SEQ ID NO: 2530 - protein, 207 aa, Homo sapiens
MWKPSPSSSPASWSCTALRAPQSCLRAATVRPVTLQARADSPTVPEPVHRPQDPWHIPGVPEPVHRPQDPWHIPGVPEPVHRPQDPWHIPGVPEPVHRPQDPWPWLQLVPPAELAYCLLMLLLAHCMKQQARPGHPDFLHREAWACLSAAGGLASPGLLLWATARPRASGEAGPGRALVGADAACCPRHSVLSLVDIPSGQVLPQGQ

SEQ ID NO: 2531 - protein, 119 aa, Homo sapiens
  MISC_FEATURE (72): Xaa equals any of the twenty naturally occurring L-amino acids
  MISC_FEATURE (73): Xaa equals any of the twenty naturally occurring L-amino acids
MVKEFGLMVFMAGVGLSAGSGINNGLGAIGGQMLIAGLIVSLVPVVICFLFGAYVLRMNRALLFGAMMGARXXAPAMEIISDTARSNIPALGYAGTYAIANVLLTLAGTIIVMVWPGLG

SEQ ID NO: 2532 - protein, 162 aa, Homo sapiens [sequence omitted]

SEQ ID NO: 2533 - protein, 107 aa, Homo sapiens
MSEPDTSSGFSGSVENGTFLELFPTSLSTSVDPSSGHLSNVYIYVSIFLSLLAFLLLLLIIALQRLKNIISSSSSYPEYPSDAGSSFTNLEVCSISSQRSTFSNLSS

SEQ ID NO: 2534 - protein, 157 aa, Homo sapiens
MALLRKINQVLLFLLIVTLCVILYKKVHKGTVPKNDADDESETPEELEEEIPVVICAAAGRMGATMAAINSIYSNTDANILFYVVGLRNTLTRIRKWIEHSKLREINFKIVEFNPMVLKGKIRPDSSRPELLQPLNFVRFYLPLLIHQHEESHLFGR

SEQ ID NO: 2535 - protein, 346 aa, Homo sapiens
  MISC_FEATURE (56): Xaa equals any of the twenty naturally occurring L-amino acids
  MISC_FEATURE (243): Xaa equals any of the twenty naturally occurring L-amino acids
  MISC_FEATURE (262): Xaa equals any of the twenty naturally occurring L-amino acids
  MISC_FEATURE (269): Xaa equals any of the twenty naturally occurring L-amino acids
  MISC_FEATURE (289): Xaa equals any of the twenty naturally occurring L-amino acids
  MISC_FEATURE (342): Xaa equals any of the twenty naturally occurring L-amino acids
  MISC_FEATURE (344): Xaa equals any of the twenty naturally occurring L-amino acids
MTSSVQVYNLSQNIQEDDLQHLQLFTEYGRLAMEEIYQKPFQTLMFLIRDWSYPYXHSYGLEGGKQFLEKRLQVKQNQHEELQNVRKHIHNCFSNLGCFLLPHPGLKVATNPSFDGRLKDIDEDFKRELRNLVPLLLAPENLVEKEISGSKVTCRDLVEYFKAYIKIYQGEELPHPKSMLQATAEANNLAAVAGARDTYCKSMEQVCGGDKPYIAPSDLERKHLDLKEVAIKQFRSVKKMGGXEFCRRYQDQLEAEIEETYXNFIKHNXGKNIFYAARTPATLFAVMFXMYIISGLTGFIGLNSIAVLCNLVMGLALIFLCTWAYVKYSGEFREIGTVIDPXCXKT

SEQ ID NO: 2536 - protein, 100 aa, Homo sapiens
  MISC_FEATURE (58): Xaa equals any of the twenty naturally occurring L-amino acids
MQIGYLYSVSFNFMFIHSFSNVYPSIQTSPNPSKLTQILPISESFLAHHSIAPICAFXFRNHILLCHASVLSLASISFWTQNPCPKHLCIPKATRIAPCK

SEQ ID NO: 2537 - protein, 151 aa, Homo sapiens
MLLFNWICIVITGLAMDMQLLMIPLIMSVLYVWAQLNRDMIVSFWFGTRFKACYLPWVILGFNYIIGGSVINELIGNLVGHLYFFLMFRYPMDLGGRNFLSTPQFLYRWLPSRRGGVSGFGVPPASMRRAADQNGGGGRHNWGQGFRLGDQ

SEQ ID NO: 2538 - protein, 129 aa, Homo sapiens [sequence omitted]

SEQ ID NO: 2539 - protein, 292 aa, Homo sapiens
MQILLYSQDYQRLMTVAEGITTLLFPFQWQHVYVPILPASLLHFLDAPVPYLMGLQSKEGTDRSKLELPQEANLCFVDIDNHFIELPEEFPQFPNKVDFIQELSEVLVQFGIPPEGSLHCSESTSKLKNMVLKDLVNDKKNGNVCTNNISMYELLKGNETIARLQALAKRTGVAVEKMDLSASLGEKDKDLKLHCEEAELRDYQLNVQLREVFANRFTQMFADYEAFVIQTAQDMESWLTNREQMQNFDKVKRTIVFLLWLLVALLLILTFLNFLFFCAYAYPYIIDFVNLF

SEQ ID NO: 2540 - protein, 260 aa, Homo sapiens
MDPGDDWLVESLRLYQDFYAFDLSGATRVLEWIDDKGVFVAGYESLKKNEILHLKLPLRLSVKENKGLFPERDFKVRHGGFSDRSIFDLKHVPHTRLLVTSGLPGCYLQVWQVAEDSDVIKAVSTIAVHEKEESLWPRVAVFSTLAPGVLHGARLRSLQVVDLESRKTTYTSDVSDSEELSSLQVLDADTFAFCCASGRLGLVDTRQKWAPLENRSPGPGSGGERWCAEVGSWGQGWGSIASLAQMGVFVFLTPGISAIL

SEQ ID NO: 2541 - protein, 232 aa, Homo sapiens
  MISC_FEATURE (20): Xaa equals any of the twenty naturally occurring L-amino acids
  MISC_FEATURE (21): Xaa equals any of the twenty naturally occurring L-amino acids
  MISC_FEATURE (26): Xaa equals any of the twenty naturally occurring L-amino acids
  MISC_FEATURE (27): Xaa equals any of the twenty naturally occurring L-amino acids
  MISC_FEATURE (33): Xaa equals any of the twenty naturally occurring L-amino acids
  MISC_FEATURE (82): Xaa equals any of the twenty naturally occurring L-amino acids
MENTNMPEGTISENTNYNHXXEADSXXTAFNLXPTVKQTETKWEYNNVGTDLSPEPKSFNYPLLSSPGDQFEIQLTQQLQSXIPNNNVRRLIAHVIRTLKMDCSGAHVQVTCAKLVSRTGHLMKLLSGQQEVKASKIEWDTDQWKTENYINESTEAQSEQKEKSLEFTKELPGYGYTKKLILALIVTGILTILIILLCLIEICCHRRSLQEDEEGFSRDSEAPTEEESEALP

SEQ ID NO: 2542 - protein, 175 aa, Homo sapiens
  MISC_FEATURE (113): Xaa equals any of the twenty naturally occurring L-amino acids
  MISC_FEATURE (143): Xaa equals any of the twenty naturally occurring L-amino acids
  MISC_FEATURE (145): Xaa equals any of the twenty naturally occurring L-amino acids
MWWDHGVYYCTIEAPGDTSGDPDKEVKLIVLHWLTVIFIILGALLLLLLIGVCWCQCCPQYCCCYIRCPCCPAHCCCPEEALARHRYMKQAQALGPQMMGKPLYWGADRSSQXSSYPMHPLLQRDLSLPSSLPQMPMTQTTNXPXIANGVLEYLEKELRNLNLAQPLPPDLKGRF

SEQ ID NO: 2543 - protein, 394 aa, Homo sapiens [sequence omitted]

SEQ ID NO: 2544 - protein, 452 aa, Homo sapiens
MLTTFGTATYKVGLKVHPNEEDPRVPIMCWGSCAYTIQSIERILSDEDKPLFGPLPCRLDDCLRSLTRFAAAHWTVASVSVVQGHFCKLFASLVPNDSHEELPCILDIDMFHLLVGLVLAFPALQCQDFSGISLGTGDLHIFHLVTMAHIIQILLTSCTEENGMDQENPPCEEESAVLALYKTLHQYTGSALKEIPSGWHLWRSVRAGIMPFLKCSALFFHYLNGVPSPPDIQVPGTSHFEHLCSYLSLPNNLICLFQENSEIMNSLIESWCRNSEVKRYLEGERDAIRYPRESNKLINLPEDYSSLINQASNFSCPKSGGDKSRAPTLCLVCGSLLCSQSYCCQTELEGEDVGACTAHTYSCGSGVGIFLRVRECQVLFLAGKTKGCFYSPPYLDDYGETDQGLRRGNPLHLCKERFKKIQKLWHQHSVTEEIGHAQEANQTLVGIDWQHL

SEQ ID NO: 2545 - protein, 532 aa, Homo sapiens
  MISC_FEATURE (136): Xaa equals any of the twenty naturally occurring L-amino acids
  MISC_FEATURE (527): Xaa equals any of the twenty naturally occurring L-amino acids
  MISC_FEATURE (529): Xaa equals any of the twenty naturally occurring L-amino acids
MSAFRAEFIATRSMDFIGMIKECDESGFPKHLLFRSLGLNLALADPPESDRLQILNEAWKVITKLKNPQDYINCAEVWVEYTCKHFTKREVNTVLADVIKHMTPDRAFEDSYPQLQLIIKKVIAHFHDFSVLFSVXKFLPFLDMFQKESVRVEVCKCIMDAFIKHQQEPTKDPVILNALLHVCKTMHDSVNALTLEDEKRMLSYLINGFIKMVSFGRDFEQQLSFYVESRSMFCNLEPVLVQLIHSVNRLAMETRKVMKGNHSRKTAAFVRACVAYCFITIPSLAGIFTRLNLYLHSGQVALANQCLSQADAFFKAAISLVPEVPKMINIDGKMRPSESFLLEFLCNFFSTLLIVPDHPEHGVLFLVRELLNVIQDYTWEDNSDEKIRIYTCVLHLLSAMSQETYLYHIDKVDSNDSLYGGDSKFLAENNKLCETVMAQILEHLKTLAKDEALKRQSSLGLSFFNSILAHGDLRNNKLNQLSVNLWHLAQRHGCADTRTMVKTLEYIKKQSKQPDMTHLTELALRLXLXTRT

SEQ ID NO: 2546 - protein, 116 aa, Homo sapiens
  MISC_FEATURE (42): Xaa equals any of the twenty naturally occurring L-amino acids
MLFLGKVLIVCSTGLAGIMLLNYQQDYTVWVLPLIIVCLFAXLVAHCFLSIYEMVVDVLFLCFAIDTKYNDGSPGREFYMDKVLMEFVENSRKAMKEAGKGGVADSRELKPMLKKR

SEQ ID NO: 2547 - protein, 131 aa, Homo sapiens
  MISC_FEATURE (106): Xaa equals any of the twenty naturally occurring L-amino acids
  MISC_FEATURE (108): Xaa equals any of the twenty naturally occurring L-amino acids
  MISC_FEATURE (115): Xaa equals any of the twenty naturally occurring L-amino acids
  MISC_FEATURE (120): Xaa equals any of the twenty naturally occurring L-amino acids
  MISC_FEATURE (127): Xaa equals any of the twenty naturally occurring L-amino acids
MTPTWTWRVCGDGGADRPPQPMVPLAVENQAGGEGAGGELGISLNMCLLGALVLLGLGVLLFSGGLSESETGPMEEVERQVLPDPEVLEAVGDRQDGLREQLQAPXPXDKCPSLXKHGSXAGQSWPXRTRT

SEQ ID NO: 2548 - protein, 116 aa, Homo sapiens
  MISC_FEATURE (97): Xaa equals any of the twenty naturally occurring L-amino acids
MDNPTFAEDEELQNMDKEDALICFEEHIRALEKEEEEEKQKSLLRERRRQRKNRESFQIFLDELHEHGQLHSMSSWMELYPTISSDIRSLICLVSLXQLHLIFSSFMLRDLKARYP

SEQ ID NO: 2549 - protein, 321 aa, Homo sapiens
  MISC_FEATURE (152): Xaa equals any of the twenty naturally occurring L-amino acids
  MISC_FEATURE (253): Xaa equals any of the twenty naturally occurring L-amino acids
  MISC_FEATURE (282): Xaa equals any of the twenty naturally occurring L-amino acids
  MISC_FEATURE (295): Xaa equals any of the twenty naturally occurring L-amino acids
  MISC_FEATURE (319): Xaa equals any of the twenty naturally occurring L-amino acids
MAAKNILYDWAAGKLYQGQVDFAFFMPCGELLERPGTRSLADLILDQCPDRGAPVPQMLAQPQRLLFILDGADELPALGGPEAAPCTDPFEAASGARVLGGLLSKALLPTALLLVTTRAAAPGRLQGRLCSPQCAEVRGFSDKDKKKYFYKXFRDERRAERAYRFVKENETLFALCFVPFVCWIVCTVLRQQLELGRDLSRTSKTTTSVYLLFITSVLSSAPVADGPRLQGDLRNLCRLAREGVLGRKAQFAXKELEQLELRGSKSADACFSAKRSCPGVLXTEVTYQFIDQELXRSSSRALVLPCWKDGRGGPRNRRXGR

SEQ ID NO: 2550 - protein, 185 aa, Homo sapiens [sequence omitted]

SEQ ID NO: 2551 - protein, 218 aa, Homo sapiens
  MISC_FEATURE (146): Xaa equals any of the twenty naturally occurring L-amino acids
  MISC_FEATURE (182): Xaa equals any of the twenty naturally occurring L-amino acids
  MISC_FEATURE (204): Xaa equals any of the twenty naturally occurring L-amino acids
  MISC_FEATURE (214): Xaa equals any of the twenty naturally occurring L-amino acids
  MISC_FEATURE (216): Xaa equals any of the twenty naturally occurring L-amino acids
  MISC_FEATURE (217): Xaa equals any of the twenty naturally occurring L-amino acids
MNGQPLTCVVSHPGLLQDQRITHILHVSFLAEASVRGLEDQNLWHIGREGAMLKCLSEGQPPPSYNWTRLDGPLPSGVRVDGDTLGFPPLTTEHSGIYVCHVSNEFSSRDSQVTVDVLDPQEDSGKQVDLVSASVVVVGVIAALLXCLLVVVVVLMSRYHRRKAQQMTQKYEEELTLTRENXIRRLHSHHTDPRSQPEESVGLXAEGHPDSLKXQXXL

SEQ ID NO: 2552 - protein, 108 aa, Homo sapiens
MFRPLMNLSHIYFKKFQYCGYAPHVRSCKPNTDGISSLENLLASIIQRVFVWVVSAVTCFGNIFVICMRPYIRSENKLYAMSIISLCCADCLMGIYLFVIGGFDLKFR

SEQ ID NO: 2553 - protein, 221 aa, Homo sapiens
  MISC_FEATURE (89): Xaa equals any of the twenty naturally occurring L-amino acids
  MISC_FEATURE (215): Xaa equals any of the twenty naturally occurring L-amino acids
MTLTCHVEGGTRLAYQWLKNGRPVHTSSTYSFSPQNNTLHIAPVTKEDIGNYSCLVRNPVSEMESDIIMPIIYYGPYGLQVNSDKGLKXGEVFTVDLGEAILFDCSADSHPPNTYSWIRRTDNTTYIIKHGPRLEVASEKVAQKTMDYVCCAYNNITGRQDETHFTVIITSVGLEKLAQKGKSLSPLASITGISLFLIISMCLLFLWKKYQPYKXIKKKKK

SEQ ID NO: 2554 - protein, 121 aa, Homo sapiens
MRADPPKFNRIWPNISSLEVSNPKQVAPKLALSTVSSVQVANHKRANVCDNELLHCQNGGTCHNNVRCLCPAAYTGILCEKLRCEEAGSCGSDSGQGAPPHGSPALLLLTTLLGTASPLVF

SEQ ID NO: 2555 - protein, 195 aa, Homo sapiens
MLLQSQTMGVSHSFTPKGITIPQREKPGHMYQNEDYLQNGLPTETTVLGFGITGSLSIISGKQSTKPFDLSSLTSNAVSSVTAGAGLFLLADSMVALRTASQHCGSEMDYLSSLPYSEYYYPIYEIKDCLLTSVSLTGVLVVMLIFTVLELLLAAYSSVFWWKQLYSNNPGSSFSSTQSQDHIQQVKKSSSRSWI

SEQ ID NO: 2556 - protein, 106 aa, Homo sapiens
  MISC_FEATURE (16): Xaa equals any of the twenty naturally occurring L-amino acids
  MISC_FEATURE (35): Xaa equals any of the twenty naturally occurring L-amino acids
MTMITPSSKLTLTKGXKSWSSTAVAAALELVDPPXCRNSAREDITEAIETTISLETARADHPKPVTVKPVTTEPQSPDLNDAVSSLRSPIPLLLSCAFVQVGMYFM

SEQ ID NO: 2557 - protein, 390 aa, Homo sapiens
  MISC_FEATURE (52): Xaa equals any of the twenty naturally occurring L-amino acids
  MISC_FEATURE (217): Xaa equals any of the twenty naturally occurring L-amino acids
  MISC_FEATURE (303): Xaa equals any of the twenty naturally occurring L-amino acids
MSVRVARVAWVRGLGASYRRGASSFPVPPPGAQGVAELLRDATGAEEEAPWXATERRMPGQCSVLLFPGQGSQVVGMGRGLLNYPRVRELYAAARRVLGYDLLELSLHGPQETLDRTVHCQPAIFVASLAAVEKLHHLQPSVIENCVAAAGFSVGEFAALVFAGAMEFAEGLYAVKIRAEAMQEASEAVPSGMLSVLGQPQSKFNFACLEAREHCKXLGIENPVCEVSNYLFPDCRVISGHQEALRFLQKNSSKFHFRRTRMLPVSGAFHTRLMEPAVEPLTQALKAVDIKKPLVSVYSNVHXHRYRHPGHIHKLLAQQLVSPVKWEQTMHAIYERKKGRGFPQTFEVGPGRQLGAILKSCNMQAWKSYSAVDVLQTLEHVDLDPQEPPR

SEQ ID NO: 2558 - protein, 311 aa, Homo sapiens
MQTFTMVLEEIWTSLFMWFFYALIPCLLTDEVAILPAPQNLSVLSTNMKHLLMWSPVIAPGETVYYSVEYQGEYESLYTSHIWIPSSWCSLTEGPECDVTDDITATVPYNLRVRATLGSQTSAWSILKHPFNRNSTILTRPGMEITKDGFHLVIELEDLGPQFEFLVAYWRREPGAEEHVKMVRSGGIPVHLETMEPGAAYCVKAQTFVKAIGRYSAFSQTECVEVQGEAIPLVLALFAFVGFMLILVVVPLFVWKMGRLLQYSCCPVVVLPDTLKITNSPQKLISCRREEVDACATAVMSPEELLRAWIS

SEQ ID NO: 2559 - protein, 331 aa, Homo sapiens
MLWLFQSLLFVFCFGPGNVVSQSSLTPLMVNGILGESVTLPLEFPAGEKVNFITWLFNETSLAFIVPHETKSPEIHVTNPKQGKRLNFTQSYSLQLSNLKMEDTGSYRAQISTKTSAKLSSYTLRILRQLRNIQVTNHSQLFQNMTCELHLTCSVEDADDNVSFRWEALGNTLSSQPNLTVSWDPRISSEQDYTCIAENAVSNLSFSVSAQKLCEDVKIQYTDTKMILFMVSGICIVFGFIILLLLVLRKRRDSLSLSTQRTQGPESARNLEYVSVSPTNNTVYASVTHSNRETEIWTPRENDTITIYSTINHSKESKPTFSRATALDNVV

SEQ ID NO: 2560 - protein, 117 aa, Homo sapiens
MTMITPSSKLTLTKGNKSWSSTAVAAALELVDPPGCRNSARAWLLQNFLLFLLLLVFSLLCFTLCSCPTVLDIIFCSFQCFFSLVFEVSDDKSSSSEILYSAESSLLISHQRYSSVI

SEQ ID NO: 2561 - protein, 187 aa, Homo sapiens
  MISC_FEATURE (118): Xaa equals any of the twenty naturally occurring L-amino acids
  MISC_FEATURE (123): Xaa equals any of the twenty naturally occurring L-amino acids
  MISC_FEATURE (126): Xaa equals any of the twenty naturally occurring L-amino acids
  MISC_FEATURE (179): Xaa equals any of the twenty naturally occurring L-amino acids
MSEEVTYADLQFQNSSEMEKIPEIGKFGEKAPPAPSHVWRPAALFLTLLCLLLLIGLGVLASMFHVTLKIEMKKMNKLQNISEELQRNISLQLMSNMNISNKIRNLSTTLQTIATKLXRELYXKEXEHKCKPCPRRWIWHKDSCYFLSDDVQTWQESKMACAAQNASLLKINNKNALEXVKSQSGNR

SEQ ID NO: 2562 - protein, 307 aa, Homo sapiens
MGGFQRGKYGTMAEGRSEDNLSATPPALRIILVGKTGCGKSATGNSILGQPVFESKLRAQSVTRTCQVKTGTWNGRKVLVVDTPSIFESQADTQELYKNIGDCYLLSAPGPHVLLLVIQLGRFTAQDTVAIRKVKEVFGTGAMRHVVILFTHKEDLGGQALDDYVANTDNCSLKDLVRECERRYCAFNNWGSVEEQRQQQAELLAVIERLGREREGSFHSNDLFLDAQLLQRTGAGACQEDYRQYQAKVEWQVEKHKQELRENESNWAYKALLRVKHLMLLHYEIFVFLLLCSILFFIIFLFIFHYI

SEQ ID NO: 2563 - protein, 121 aa, Homo sapiens
MVPALRYLVGACGRARGLFAGGSPGACGFASGRPRPLCGGSRSASTSSFDIVIVGGGIVGLASARALILRHPSLSIGVLEKEKDLAVHQTGHNSGVIHSGIYYKPESLKSQIMCTRCSPPL

SEQ ID NO: 2564 - protein, 256 aa, Homo sapiens
MALLHYLMYLVMVAAIAWEETYRTIGLYWVGSIIMSVVVFVPGNIVGKYGTRICPAFFLSIPYTCLPVWAGFRIYNQPSENYNYPSKVIQEAQAKDLLRRPFDLMLVVCLLLATGFCLFRGLIALDCPSELCRLYTQFQEPYLKDPAAYPKIQMLAYMFYSVPYFVTALYGLVVPGCSWMPDITLIHAGGLAQAQFSHIGASLHARTAYVYRVPEEAKILFLALNIAYGVLPQLLAYRCIYKPEFFIKTKAEEKVE

SEQ ID NO: 2565 - protein, 232 aa, Homo sapiens
  MISC_FEATURE (114): Xaa equals any of the twenty naturally occurring L-amino acids
  MISC_FEATURE (136): Xaa equals any of the twenty naturally occurring L-amino acids
MTVEKEAPDAHFTVDKQNISLWPREPPPKSGPSLVPGKTPTVRAALICLTLVLVASVLLQAVLYPRFMGTISDVKTNVQLLKGRVDNISTLDSEIKKNSDGMEAAGVQIQMVNXSLGYVRSQFLKLKTSVEKANAXIQILTRSWEEVSTLNAQIPELKSDLEKASALNTKIRALQGSLENMSKLLKRQNDILQVVSQGWKYFKGNFYYFSLIPKTWYSAEQFCVSRNSHLTS

SEQ ID NO: 2566 - protein, 250 aa, Homo sapiens
MNSMTSAVPVANSVLVVAPHNGYPVTPGIMSHVPLYPNSQPQVHLVPGNPPSLVSNVNGQPVQKALKEGKTLGAIQIIIGLAHIGLGSIMATVLVGEYLSISFYGGFPFWGGLWFIISGSLSVAAENQPYSYCLLSGSLGLNIVSAICSAVGVILFITDLSIPHPYAYPDYYPYAWGVNPGMAISGVLLVFCLLEFGIACASSHFGCQLVCCQSSNVSVIYPNIYAANPVITPEPVTSPPSYSSEIQANK

SEQ ID NO: 2567 - protein, 286 aa, Homo sapiens
  MISC_FEATURE (7): Xaa equals any of the twenty naturally occurring L-amino acids
  MISC_FEATURE (13): Xaa equals any of the twenty naturally occurring L-amino acids
  MISC_FEATURE (20): Xaa equals any of the twenty naturally occurring L-amino acids
MTMITPXSKLTLXKGNKSWXSTAVAAALELVDPPGCRNSARVGCSRSRQPQARGGRWARDPTLVVMEAGGFLDSLIYGACVVFTLGMFSAGLSDLRHMRMTRSVDNVQFLPFLTTEVNNLGWLSYGALKGDGILIVVNTVGAALQTLYILAYLHYCPRKRVVLLQTATLLGVLLLGYGYFWLLVPNPEARLQQLGLFCSVFTISMYLSPLADLAKVIQTKSTQCLSYPLTIATLLTSASWCLYGFRLRDPYIMVSNFPGIVTSFIRFWLFWKYPQEQDRNYWLLQT

SEQ ID NO: 2568 - protein, 270 aa, Homo sapiens [sequence omitted]

SEQ ID NO: 2569 - protein, 341 aa, Homo sapiens
  MISC_FEATURE (276): Xaa equals any of the twenty naturally occurring L-amino acids
  MISC_FEATURE (279): Xaa equals any of the twenty naturally occurring L-amino acids
  MISC_FEATURE (322): Xaa equals any of the twenty naturally occurring L-amino acids
  MISC_FEATURE (323): Xaa equals any of the twenty naturally occurring L-amino acids
  MISC_FEATURE (326): Xaa equals any of the twenty naturally occurring L-amino acids
MRKVVLITGASSGIGLALCKRLLAEDDELHLCLACRNMSKAEAVCAALLASHPTAEVTIVQVDVSNLQSVFRASKELKQRFQRLDCIYLNAGIMPNPQLNIKALFFGLFSRKVIHMFSTAEGLLTQGDKITADGLQEVFETNVFGHFILIRELEPLLCHSDNPSQLIWTSSRSARKSNFSLEDFQHSKGKEPYSSSKYATDLLSVALNRNFNQQGLYSNVACPGTALTNLTYGILPPFIWTLLMPAILLLRFFANAFTLTPYNGTEALVWLFHQKXESXNPLIKYLSATTGFGRNYIMTQKMDLDEDTAEKFYQKLLELEKXXRVXIQKTDNQARLSGSCL

SEQ ID NO: 2570 - protein, 241 aa, Homo sapiens
MTLQWAAVATFLYAEIGLILIFCLPFIPPQRWQKIFSFNVWGKIATFWNKAFLTIIILLIVLFLDAVREVRKYSSVHTIEKSSTSRPDAYEHTQMKLFRSQRNLYISGFSLFFWLVLRRLVTLITQLAKELSNKGVLKTQAENTNKAAKKFMEENEKLKRILKSHGKDEECVLEAENKKLVEDQEKLKTELRKTSDALSKAQNDVMEMKMQSERLSKEYDQLLKEHSELQDRLERGNKKRL

SEQ ID NO: 2571 - protein, 122 aa, Homo sapiens
  MISC_FEATURE (3): Xaa equals any of the twenty naturally occurring L-amino acids
MAXIHTPYSSLKKLLSLLNGFVAVSGIILVGLGIGGKCGGASLTNVLGLSSAYLLHVGNLCLVMGCITVLLGCAGWYGATKESRGTLLFVGDVALEHTFVTLRKNYRGYNEPDDYSTQWNLV

SEQ ID NO: 2572 - protein, 778 aa, Homo sapiens
  MISC_FEATURE (74): Xaa equals any of the twenty naturally occurring L-amino acids
MAQKMDCGAGLLGFQAEASVEDSALLMQTLMEAIQISEAPPTNQATAAASPQSSQPPTANEMADIQVSAAAARXKSAFKVQNATTKGPNGVYDFSQAHNAKDVPNTQPKAAFKSQNATPKGPNAAYDFSQAATTGELAANKSEMAFKAQNATTKVGPNATYNFSQSLNANDLANSRPKTPFKAWNDTTKAPTADTQTQNVNQAKMATSQADIETDPGISEPDGATAQTSADGSQAQNLESRTIIRGKRTRKINNLNVEENSSGDQRRAPLAAGTWRSAPVPVTTQNPPGAPPNVLWQTPLAWQNPSGWQNQTARQTPPARQSPPARQTPPAWQNPVAWQNPVIWPNPVIWQNPVIWPNPIVWPGPVVWPNPLAWQNPPGWQTPPGWQTPPGWQGPPDWQGPPDWPLPPDWPLPPDWPLPTDWPLPPDWIPADWPIPPDWQNLRPSPNLRPSPNSRASQNPGAAQPRDVALLQERANKLVKYLMLKDYTKVPIKRSEMLRDIIREYTDVYPEIIERACFVLEKKFGIQLKEIDKEEHLYILISTPESLAGILGTTKDTPKLGLLLVILGVIFMNGNRASEAVLWEALRKMGLRPGVRHPLLGDLRKLLTYEFVKQKYLDYRRVPNSNPPEYEFLWGLRSYHETSKMKVLRFIAEVQKRDPRDWTAQFMEAADEALDALDAAAAEAEARAEARTRMGIGDEAVSGPWSWDDIEFELLTWDEEGDFGDPWSRIPFTFWARYHQNARSRFPQTFAGPIIGPGGTASANFAANFGAIGFFWVE

SEQ ID NO: 2573 - protein, 103 aa, Homo sapiens
  MISC_FEATURE (11): Xaa equals any of the twenty naturally occurring L-amino acids
  MISC_FEATURE (13): Xaa equals any of the twenty naturally occurring L-amino acids
  MISC_FEATURE (21): Xaa equals any of the twenty naturally occurring L-amino acids
MGFTRFSLLCXGXAKLKYPYXWSTPVKGSEFFSAYRKINQTGSISRVSSVQEEFLKLLSATCVFLGICPCVTLQTSTLGSPGSASNQRSSLAAAELPISKVDT

SEQ ID NO: 2574 - protein, 317 aa, Homo sapiens
  MISC_FEATURE (115): Xaa equals any of the twenty naturally occurring L-amino acids
  MISC_FEATURE (226): Xaa equals any of the twenty naturally occurring L-amino acids
  MISC_FEATURE (241): Xaa equals any of the twenty naturally occurring L-amino acids
  MISC_FEATURE (242): Xaa equals any of the twenty naturally occurring L-amino acids
  MISC_FEATURE (246): Xaa equals any of the twenty naturally occurring L-amino acids
  MISC_FEATURE (275): Xaa equals any of the twenty naturally occurring L-amino acids
MASADELTFHEFEEATNLLADTPDAATTSRSDQLTPQGHVAVAVGSGGSYGAEDEVEEESDKAALLQEQQQQQQPGFWTFSYYQSFFDVDTSQVLDRIKGSLLPRPGHNFVRHHXRNRPDLYGPFWICATLAFVLAVTGNLTLVLAQRRDPSIHYSPQFHKVTVAGISIYCYTWLVPLALWGFLRWRKGVQERMGPYTFLETVCIYGYSLFVFIPMVVLWLIPCAXGYSGSLGALALGLSXXGLVXTLWPVVREDTRLVATVLLSVVVLLHALLXMGCKLYFFQSLPPENVAPPPQITSLPSNIALSPTLPQSLAPS

SEQ ID NO: 2575 - protein, 182 aa, Homo sapiens
  MISC_FEATURE (68): Xaa equals any of the twenty naturally occurring L-amino acids
  MISC_FEATURE (69): Xaa equals any of the twenty naturally occurring L-amino acids
  MISC_FEATURE (76): Xaa equals any of the twenty naturally occurring L-amino acids
MLLEALYLFLTARNLTVVNYSSINRFMKKLMFPVGYGVPAVTVAISAASRPHLYGTPSRCWLQPEKGXXWGFLGPXCAIFSVNLVLFLVTLWILKNRLSSLNSEVSTLRNTRMLAFKATVSCSSWAARGVWASCRWVRLPGSWPTSSPSSTACRVSSSSWCTASSASRSGSNMGNGPKGSGN

SEQ ID NO: 2576 - protein, 162 aa, Homo sapiens
MLRAVGSLLRLGRGLTVRCGPGAPLEATRRPAPALPPRGLPCYSSGGAPSNSGPQGHGEIHRVPTQRRPSQFDKKILLWTGRFKSMEEIPPRIPPEMIDTARNKARVKACYIMIGLTIIACFAVIVSAKRAVERHESLTSWNLAKKAKWREEAALAAQAKAK

SEQ ID NO: 2577 - protein, 213 aa, Homo sapiens
  MISC_FEATURE (80): Xaa equals any of the twenty naturally occurring L-amino acids
  MISC_FEATURE (199): Xaa equals any of the twenty naturally occurring L-amino acids
  MISC_FEATURE (208): Xaa equals any of the twenty naturally occurring L-amino acids
MADDAGLETPLCSEQFGSGEARGCRAAADGSLQWEVGGWRWWGLSRAFTVKPEGRDAGEVGASGAPSPPLSGLQAVFLPXGFPDSVSPDYLPYQLWDSVQAFASSLSGSLATQAVLLGIGVGNAKATVSAATATWLVKDSTGMLGRIVFAWWKGSKLDCNAKQWRLFADILNDVAMFLEIMAPVYPICFTMTVSTSNLXKCIVSVAGXATRLP

SEQ ID NO: 2578 - protein, 131 aa, Homo sapiens
MPKACTGLKVVMRHERHSSQATQDSIYPTFLRQQNSGDGAKVSGGQGLGVAMKGWLPCDDSICYVFPLWFSVSMFYLIFFELCHPGWNQWHDLGSLQPPPPGFKQFSCLSCPSSCDYRHAPPCPANFCTFF

SEQ ID NO: 2579 - protein, 374 aa, Homo sapiens
MRPGTALQAVLLAVLLVGLRAATGRLLSGQPVCRGGTQRPCYKVIYFHDTSRRLNFEEAKEACRRDGGQLVSIESEDEQKLIEKFIENLLPSDGDFWIGLRRREEKQSNSTACQDLYAWTDGSISQFRNWYVDEPSCGSEVCVVMYHQPSAPAGIGGPYMFQWNDDRCNMKNNFICKYSDEKPAVPSREAEGEETELTTPVLPEETQEEDAKKTFKESREAALNLAYILIPSIPLLLLLVVTTVVCWVWICRKRKREQPDPSTKKQHTIWPSPHQGNSPDLEVYNVIRKQSEADLAETRPDLKNISFRVCSGEATPDDMSCDYDNMAVNPSESGFVTLVSVESGFVTNDIYEFSPDQMGRSKESGWVENEIYGY

SEQ ID NO: 2580 - protein, 167 aa, Homo sapiens
MESNLSGLVPAAGLVPALPPAVTLGLTAAYTTLYALLFFSVYAQLWLVLLYGHKRLSYQTVFLALCLLWAALRTTLFSFYFRDTPRANRLGPLPFWLLYCCPVCLQFFTLTLMNLYFAQVVFKAKVKRRPEMSRGFGSQGVEEAGSLLSLRVLCCYLCQGTSVCQAA

SEQ ID NO: 2581 - protein, 186 aa, Homo sapiens
MAVIYTKLYCNLEKEDLSENSQSSMIKHVAWLIFTNCIFFCPVAFFSFAPLITAISISPEIMKSVTLIFFPLPACLNPVLYVFFNPKFKEDWKLLKRRVTKKSGSVSVSISSQGGCLEQDFYYDCGMYSHLQGNLTVCDCCESFLLTKPVSCKHLIKSHSCPALAVASCQRPEGYWSDCGTQCGPL

SEQ ID NO: 2582 - protein, 148 aa, Homo sapiens [sequence omitted]

SEQ ID NO: 2583 - protein, 345 aa, Homo sapiens
MKGELLLFSSVIVLLQVVCSCPDKCYCQSSTNFVDCSQQGLAEIPSHLPPQTRTLHLQDNQIHHLPAFAFRSVPWLMTLNLSNNSLSNLAPGAFHGLQHLQVLNLTQNSLLSLESRLFHSLPQLRELDLSSNNISHLPTSLGETWENLTILAVQQNQLQQLDRALLESMPSVRLLLLKDNLWKCNCHLLGLKLWLEKFVYKGGLTDGIICESPDTWKGKDLLRIPHELYQPCPLPAPDPVSSQAQWPGSAHGVVLRPPENHNAGERELLECELKPKPRPANLRHAIATVIITGVVCGIVCLMMLAAAIYGCTYAAITAQYHGGPLAQTNDPGKVEEKERFDSSPA

SEQ ID NO: 2584 - protein, 109 aa, Homo sapiens
  MISC_FEATURE (74): Xaa equals any of the twenty naturally occurring L-amino acids
MIMGMIAQNKKKSCLTTVFYRRDWEKSSCFLCDLISEETDPKIITAGNLVHLALRFKCNQNCPQGPAIKALSLXTFWYLVRELFTVRKCGKIALCVCVCVCVCNLLGWG

SEQ ID NO: 2585 - protein, 333 aa, Homo sapiens [sequence omitted]

SEQ ID NO: 2586 - protein, 314 aa, Homo sapiens
  MISC_FEATURE (38): Xaa equals any of the twenty naturally occurring L-amino acids
MTAAIRRQRELSILPKVTLEAMNTTVMQGFNRSERCPXDTRIVQLVFPALYTVVFLTGILLNTLALWVFVHIPSSSTFIIYLKNTLVADLIMTLMLPFKILSDSHLAPWQLRAFVCRFSSVIFYETMYVGIVLLGLIAFDRFLKIIRPLRNIFLKKPVFAKTVSIFIWFFLFFISLPNMILSNKEATPSSVKKCASLKGPLGLKWHQMVNNICQFIFWTVFILMLVFYVVIAKKYMILIESPKVRTEKTTKSWKAKYLLSWLSSLCVLLHFISPEFHILTVKPTIRLTVDCKINCLLLKKQLSFWQQLTFVWIP

SEQ ID NO: 2587 - protein, 324 aa, Homo sapiens
MAAAAPGNGRASAPRLLLLFLVPLLWAPAAVRAGPDEDLSHRNKEPPAPAQQLQPQPVAVQGPEPARVEKIFTPAAPVHTNKEDPATQTNLGFIHAFVAAISVIIVSELGDKTFFIAAIMAMRYNRLTVLAGAMLALGLMTCLSVLFGYATTVIPRVYTYYVSTVLFAIFGIRMLREGLKMSPDEGQEELEEVQAELKKKDEEFQRTKLLNGPGDVETGTSITVPQKKWLHFISPIFVQALTLTFLAEWGDRSQLTTIVLAAREDPYGVAVGGTVGHCLCTGLAVIGGRMIAQKISVRTVTIIGGIVFLAFAFSALFISPDSGF

SEQ ID NO: 2588 - protein, 148 aa, Homo sapiens
  MISC_FEATURE (109): Xaa equals any of the twenty naturally occurring L-amino acids
MDFLVLFLFYLASVLMGLVLICVCSKTHSLKGLARGGAQIFSCIIPECLQRAVHGLLHYLFHTRNHTFIVLHLVLQGMVYTEYTWEVFGYCQELELSLHYLLLPYLLLXVNLFFFTLTCGTNPGIITKANELLFLHVYEFDEVMFQRT

SEQ ID NO: 2589 - protein, 177 aa, Homo sapiens
MALSYAISSPLFGLLSDKRPPLRKWLLVFGNLITAGCYMLLGPVPILHIKSQLWLLVLILVVSGLSAGMSIIPTFPEILSCAHENGFEEGLSTLGLVSGLFSAMWSIGAFMGPTLGGFLYEKIGFEWAAAIQGLWALISGLAMGLFYLLEYSRRKRSKSQNILSTEEERTTLLPNET

SEQ ID NO: 2590 - protein, 447 aa, Homo sapiens
MLNSILVILCLIAVSAFFSMSEISLAASRKIKLKLLADEGNINAQRVLNMQENPGMFFTVVQIGLNAVAILGGIVGDAAFSPAFHSLFSRYMSAELSEQLSFILSFSLVTGMFILFADLTPKRIGMIAPEAVALRIINPMRFCLYVCTPLVWFFNGLANIIFRIFKLPMVRKDDITSDDIYAVVEAGALAGVLRKQEHELIENVFELESRTVPSSMTPRENVIWFDLHEDEQSLKNKVAEHPHSKFLVCNEDIDHIIGYVDSKDLLNRVLANQSLALNSGVQIRNTLIVPDTLTLSEALESFKTAGEDFAVIMNEYALVVGIITLNDVMTTLMGDLVGQGLEEQIVARDENSWLIDGGTPIDDVMRVLDIDEFPQSGNYETIGGFMMFMLRKIPKRTDSVKFAGYKFEVVDIDNYRIDQLLVTRIDSKATALSPKLPDAKDKEESVA

SEQ ID NO: 2591 - protein, 348 aa, Homo sapiens
MLCPWRTANLGLLLILTIFLVAEAEGAAQPNNSLMLQTSKENHALASSSLCMDEKQITQNYSKVLAEVNTSWPVKMATNAVLCCPPIALRNLIIITWEIILRGQPSCTKAYKKETNETKETNCTDERITWVSRPDQNSDLQIRTVAITHDGYYRCIMVTPDGNFHRGYHLQVLVTPEVTLFQNRNRTAVCKAVAGKPAAHISWIPEGDCATKQEYWSNGTVTVKSTCHWEVHNVSTVNCHVSHLTGNKSLYIELLPVPGAKKSAKLYIPYIILTIIILTIVGFIWLLKVNGCRKYKLNKTESTPVVEEDEMQPYASYTEKNNPLYDTTNKVKASEALQSEVDTDLHTL

SEQ ID NO: 2592 - protein, 222 aa, Homo sapiens [sequence omitted]

SEQ ID NO: 2593 - protein, 432 aa, Homo sapiens
FCVGVEAGPNFFSIFFRDGKNYLMLALVMVGSALVIALGLGKLFGWDIGLTAGMLAGSMTSTPVLVGAGDTLRHSGMESRQLSLALDNLSLGYALTYLIGLVSLIVGARYLPKLQHQDLQTSAQQIARERGLDTDANRKVYLPVIRAYRVGPELVAWTDGKNLRELGIYRQTGCYIERIRRNGILANPDGDAVLQMGDEIALVGYPDAHARLDPSFRNGKEVFDRDLLDMRIVTEEVVVKNHNAVGKRLAQLKLTDHGCFLNRVIRSQIEMPIDDNVVLNKGDVLQVSGDARRVKTIADRIGFISIHSQVTDLLAFCAFFVIGLMIGMITFQFSTFSFGMGNAAGLLFAGIMLGFMRANHPTFGYIPQGALSMVKEFGLMVFMAGVGLSAGSGINNGLGAIGGQMLIAGLIVSLVPVAGASTESRRGCLGGR

SEQ ID NO: 2594 - protein, 328 aa, Homo sapiens
  MISC_FEATURE (319): Xaa equals any of the twenty naturally occurring L-amino acids
  MISC_FEATURE (326): Xaa equals any of the twenty naturally occurring L-amino acids
  MISC_FEATURE (327): Xaa equals any of the twenty naturally occurring L-amino acids
MGPRIGPAGEVPQVPDKETKATMGTENTPGGKASPDPQDVRPSVFHNIKLFVLCHSLLQLAQLMISGYLKSSISTVEKRFGLSSQTSGLLASFNEVGNTALIVFVSYFGSRVHRPRMIGYGAILVALAGLLMTLPHFISEPYRYDNTSPEDMPQDFKASLCLPTTSAPASAPSNGNCSSYTETQHLSVVGIMFVAQTLLGVGGVPIQPFGISYIDDFAHNSNSPLYLGILFAVTMMGPGLAFGLGSLMLRLYVDINQMPEGGISLTIKDPRWVGAWWLGFLIAAGAVALAAIPYFFFPKEMPKEKVSFISAKGLSSHRXTARKGRXXL

SEQ ID NO: 2595 - protein, 309 aa, Homo sapiens
MAAEWASRFWLWATLLIPAAAVYEDQVGKFDWRQQYVGKVKFASLEFSPGSKKLVVATEKNVIAALNSRTGEILWRHVDKGTAEGAVDAMLLHGQDVITVSNGGRIMRSWETNIGGLNWEITLDSGSFQALGLVGLQESVRYIAVLKKTTLALHHLSSGHLKWVEHLPESDSIHYQMVYSYGSGVVWALGVVPFSHVNIVKFNVEDGEIVQQVRVSTPWLQHLSGACGVVDEAVLVCPDPSSRSLQTLALETEWELRQIPLQSLDLEFGSGFQPRVLPTQPNPVDASGPSSSCTCPQATMLCCSTIMER

SEQ ID NO: 2596 - protein, 149 aa, Homo sapiens [sequence omitted]

SEQ ID NO: 2597 - protein, 359 aa, Homo sapiens
MPLELELCPGRWVGGQHPCFIIAEIGQNHQGDLDVAKRMIRMAKECGADCAKFQKSELEFKFNRKALERPYTSKHSWGKTYGEHKRHLEFSHDQYRELQRYAEEVGIFFTASGMDEMAVEFLHELNVPFFKVGSGDTNNFPYLEKTAKKGRPMVISSGMQSMDTMKQVYQIVKPLNPNFCFLQCTSAYPLQPEDVNLRVISEYQKLFPDIPIGYSGHETGIAISVAAVALGAKVLERHITLDKTWKGSDHSASLEPGELAELVRSVRLVERALGSPTKQLLPCEMACNEKLGKSVVAKVKIPEGTILTMDMLTVKVGEPKGYPPEDIFNLVGKKVLVTVEEDDTIMEELVDNHGKKIKS

SEQ ID NO: 2598 - protein, 198 aa, Homo sapiens
  MISC_FEATURE (79): Xaa equals any of the twenty naturally occurring L-amino acids
  MISC_FEATURE (141): Xaa equals any of the twenty naturally occurring L-amino acids
  MISC_FEATURE (158): Xaa equals any of the twenty naturally occurring L-amino acids
  MISC_FEATURE (195): Xaa equals any of the twenty naturally occurring L-amino acids
MFRCPSNHQMVGSGLLTCTWKGSIAEWSSGSPVCKLVPPHETFGFKVAVIASIVSCAIILLMSMAFLTCCLLKCVKKSXRRRSNRSAQLWSQLKDEDLETVQAAYLGLKHFNKPVSGPSQAHDNHSFTTDHGESTSKLASXTRSVDKDPGIPRALSLXGSSSSPQAQVMVHMANPRQPLLASGLATGNATTARSXCLG

SEQ ID NO: 2599 - protein, 121 aa, Homo sapiens
MVHIQNAALAGGVVVGTSSEMMLTPFGALAAGFLAGTVSTLGYKFFTPILESKFKVQDTCGVHNLHGMPGVLGALLGVLVAGLATHEAYGDGLESVFPLIAEGQRMPRHRPCTSSSGCLSH

SEQ ID NO: 2600 - protein, 195 aa, Homo sapiens
  MISC_FEATURE (167): Xaa equals any of the twenty naturally occurring L-amino acids
  MISC_FEATURE (170): Xaa equals any of the twenty naturally occurring L-amino acids
MESTLGAGIVIAEALQNQLAWLENVWLWITFLGDPKILFLFYFPAAYYASRRVGIAVLWISLITEWLNLIFKWFLFGDRPFWWVHESGYYSQAPAQVHQFPSSCETGPGSPSGHCMITGAALWPIMTALSSQVATRARSRWVRVMPSLAYCTFLLAVGLSRIFILAXFPXQVLAGLITGAVLGWLMTPRVPMERD

SEQ ID NO: 2601 - protein, 182 aa, Homo sapiens
MWPPDPDPDPDPEPAGGSRPGPAVPGLRALLPARAFLCSLKGRLLLAESGLSFITFICYVASSASAFLTAPLLEFLLALYFLFADAMQLNDKWQGLCWPMMDFLRCVTAALIYFAISITAIAKYSDGASKAAGVFGFFATIVFATDFYLIFNDVAKFLKQGDSADETTAHKTEEENSDSDSD

SEQ ID NO: 2602 - protein, 115 aa, Homo sapiens
  MISC_FEATURE (89): Xaa equals any of the twenty naturally occurring L-amino acids
  MISC_FEATURE (98): Xaa equals any of the twenty naturally occurring L-amino acids
  MISC_FEATURE (107): Xaa equals any of the twenty naturally occurring L-amino acids
MATAEGLIKRSKGKERPFVLTRSFFAGSQKYGAVWTGDNTAEWSNLKISIPMLLTLSITGISFCGLYIGGFIGESRDRAASALVPGWSXPALLPWPCXMEHQATRAXLFGEEHTR

SEQ ID NO: 2603 - protein, 257 aa, Homo sapiens
  MISC_FEATURE (101): Xaa equals any of the twenty naturally occurring L-amino acids
  MISC_FEATURE (104): Xaa equals any of the twenty naturally occurring L-amino acids
  MISC_FEATURE (123): Xaa equals any of the twenty naturally occurring L-amino acids
MLGSLVSSYPVTGSFGRTAVNAQSGVCTPAGALVTGVLVLLSLDYLTSLFYYIPKSALAAVIIMAVAPLFDTKIFRTLWRVKRLDLLPLCVTFLLCFWEVXYGXLAGGLVSLLMLLHSAARPXTKVSEGPVLVLQPASGLSFPAMEALREEILSRALEVSPPRCLVLECTHVCSIDYTVVLGLGELLQDFQKQGVALAFVGLQVPVLRVLLSADLKGFQYFSTLEEAEKHLRQEPGTQPYNIREDSILDQKVALLKA

SEQ ID NO: 2604 - protein, 178 aa, Homo sapiens
  MISC_FEATURE (98): Xaa equals any of the twenty naturally occurring L-amino acids
  MISC_FEATURE (104): Xaa equals any of the twenty naturally occurring L-amino acids
  MISC_FEATURE (105): Xaa equals any of the twenty naturally occurring L-amino acids
  MISC_FEATURE (110): Xaa equals any of the twenty naturally occurring L-amino acids
  MISC_FEATURE (114): Xaa equals any of the twenty naturally occurring L-amino acids
  MISC_FEATURE (120): Xaa equals any of the twenty naturally occurring L-amino acids
  MISC_FEATURE (154): Xaa equals any of the twenty naturally occurring L-amino acids
  MISC_FEATURE (156): Xaa equals any of the twenty naturally occurring L-amino acids
MPSNQGKIDNEEQPPHEGKPEVACILEDKKLENEGNTENTGKRVEEPLKDKEKPESAGKAKGEGKSERKGKSEMQGGSKTEGKPERGGRAEGEGEPDXEREPEXXGEPEXETRXSGKRPXEVVLPRKAQKKNQQGFVHYLSIFRSLTVLIFSIXGXLGVFALVRLGLKEKATDFGLFL

SEQ ID NO: 2605 - protein, 245 aa, Homo sapiens
MKVPQSGTLKLSHLQEGTYTFQLTVTDTAGQRSSDNVSVTVLRAAYSTGGCLHTCSRYHFFCDDGCCIDITLACDGVQQCPDGSDEDFCQNLGLDRKMVTHTAASPALPRTTGPSEDAGGDSLVEKSQKATAPNKPPALSNTEKRNHSAFWGPESQIIPVMPDSSSSGKNRKEESYIFESKGDGGGGEHPAPETGAVLPLALGLAITALLLLMVACRLRLVKQKLKKARPITSEESDYLINGMYL

SEQ ID NO: 2606 - protein, 558 aa, Homo sapiens
  MISC_FEATURE (39): Xaa equals any of the twenty naturally occurring L-amino acids
MSDLRRKRTAHERAKELYSSGEFSSGRKWGDDAPKEEVXTGAVNLIESGACGAFVHGLEDEMYEVRIAAVEALCMLAQSSPSFAEKCLDFLVDMFNDEIEEVRLQSIHTMRKISNNITLREDQLDTVLAVLEDSSRDIREALHELLCCTNVSTKEGIHLALVELLKNLTKYPTDRDSIWKCLKFLGSRHPTLVLPLVPELLSTHPFFDTAEPDMDDPAYIAVLVLIFNAAKTCPTMPALFSDHTFRHYAYLRDSLSHLVPALRLPGRKLVSSAVSPSIIPQEDPSQQFLQQSLERVYSLQHLDPQGAQELLEFTIRDLQRLGELQSELAGVADFSATYLRCQLLLIKALQEKLWNVAAPLYLKQSDLASAAAKQIMEETYKMEFMYSGVENKQVVIIHHMRLQAKALQLIVTARTTRGLDPLFGMCEKFLQEVDFFQRYFIADLPHLQDSFVDKLLDLMPRLMTSKPAEVVKILQTMLRQSAFLHLPLPEQIHKASATIIEPAGESDNPLRFTSGLVVALDVDATPVLAFQNAPGWRVVRCHHRWKPASRAPFPSASL

SEQ ID NO: 2607 - protein, 175 aa, Homo sapiens
MSHGAGLVRTTCSSGSALGPGAGAAQPSASPLEGLLDLSYPRTHAALLKVAQMVTLLIAFICVRSSLWTNYSAYSYFEVVTICDLIMILAFYLVHLFRFYRVLTCISWPLSELLHYLIGTLLLLIASIVAASKSYNQSGLVAGAIFGFMATFLCMASIWLSYKISCVTQSTDAAV

SEQ ID NO: 2608 - protein, 284 aa, Homo sapiens
  MISC_FEATURE (26): Xaa equals any of the twenty naturally occurring L-amino acids
  MISC_FEATURE (35): Xaa equals any of the twenty naturally occurring L-amino acids
  MISC_FEATURE (43): Xaa equals any of the twenty naturally occurring L-amino acids
  MISC_FEATURE (45): Xaa equals any of the twenty naturally occurring L-amino acids
  MISC_FEATURE (60): Xaa equals any of the twenty naturally occurring L-amino acids
  MISC_FEATURE (213): Xaa equals any of the twenty naturally occurring L-amino acids
  MISC_FEATURE (224): Xaa equals any of the twenty naturally occurring L-amino acids
  MISC_FEATURE (225): Xaa equals any of the twenty naturally occurring L-amino acids
  MISC_FEATURE (237): Xaa equals any of the twenty naturally occurring L-amino acids
  MISC_FEATURE (247): Xaa equals any of the twenty naturally occurring L-amino acids
  MISC_FEATURE (283): Xaa equals any of the twenty naturally occurring L-amino acids
MMLLSEGMKEEGLFRLAAGASVLKRXKQTMASDPXSLEEFCSXPXAVAGALKSYLRELPXPLMTFDLYDDWMRAASLKEPGARLQALQEVCSRLPPENLSNLRYLMKFLARLAEEQEVNKMTPSNIAIVLGPNLLWPPEKEGDQAQLDAASVSSIQVVGVVEALIQSADTLFPGDINFNVSGLFSAVTLQDTVSDRLASEELPSTAVPTPATXPAPAPAPAPAXXPALASAATKERXESEVPPRPAXPKVTRSPPETAAPVEDMARRTKRPAPAGPPCRPPGXR

SEQ ID NO: 2609 - protein, 199 aa, Homo sapiens
  MISC_FEATURE (13): Xaa equals any of the twenty naturally occurring L-amino acids
  MISC_FEATURE (193): Xaa equals any of the twenty naturally occurring L-amino acids
MDEAGNKVEQCKXQLAADMYNFMAKEGEYGKFFVTLLEAQADYHRKALAVLEKTLPEMRAHQDKWAEKPAFGTPLEEHLKRSGREIALPIEACVMLLLETGMKEEGLFRIGAGASKLKKLKAALDCSTSHLDEFYSDPHAVAGALKSYLRELPEPLMTFNLYEEWTQVASVQDQDKKLQDLWRTCQKLPPQNXVNFRYV

SEQ ID NO: 2610 - protein, 324 aa, Homo sapiens [sequence omitted]

SEQ ID NO: 2611 - protein, 241 aa, Homo sapiens
MWDQRLVRLALLQHLRAFYGIKVKGVRGQCDRRRHETAATEIGGKIFGVPFNALPHSAVPEYGHIPSFLVDACTSLEDHIHTEGLFRKSGSVIRLKALKNKVDHGEGCLSSAPPCDIAGLLKQFFRELPEPILPADLHEALLKAQQLGTEEKNKAILLLSCLLADHTVHVLRYFFNFLRNVSLRSSENKMDSSNLAVIFAPNLLQTSEGHEKMSSNAEKKVRLQAAVVQTLIDYASDIGKM

SEQ ID NO: 2612 - protein, 107 aa, Homo sapiens
  MISC_FEATURE (72): Xaa equals any of the twenty naturally occurring L-amino acids
  MISC_FEATURE (82): Xaa equals any of the twenty naturally occurring L-amino acids
  MISC_FEATURE (103): Xaa equals any of the twenty naturally occurring L-amino acids
MGTWGGDGNKRGTGKCPNTPVVPIPCRLPAFPKPSPTYLRTSAEQTLPLLLPHLHGLCFINLCILASQHAWXQLTFWEASQXYLLFLSLTLATVKPLVEPGPXLHVG

SEQ ID NO: 2613 - protein, 131 aa, Homo sapiens
  MISC_FEATURE (101): Xaa equals any of the twenty naturally occurring L-amino acids
  MISC_FEATURE (103): Xaa equals any of the twenty naturally occurring L-amino acids
  MISC_FEATURE (110): Xaa equals any of the twenty naturally occurring L-amino acids
MEEGGNLGGLIKMVHLLVLSGAWGMQMWVTFVSGFLLFRSLPRHTFGLVQSKLFPFYFHISMGCAFINLCILASQHAWAQLTFWEASQLYLLFLSLTLATXNXRWLEPRXTAAMWALQTVEKERGLGGEVP

SEQ ID NO: 2614 - protein, 172 aa, Homo sapiens
  MISC_FEATURE (163): Xaa equals any of the twenty naturally occurring L-amino acids
MDLTANLNLLWSAPFQILMAVYLLWQELGPAVLAGVAVLVFVIPINALAATKIKKLKVSLATLCVYFLLDEGNILTATKVFTSMSLFNILRIPLFELPTVISAVVQTKISLGRLEDFLNTEELLPQSIETNYTGDHAIGFTDASFSWDKTGMPVLKEALWLMXLNKPGFKIA

SEQ ID NO: 2615 - protein, 146 aa, Homo sapiens [sequence omitted]

SEQ ID NO: 2616 - protein, 140 aa, Homo sapiens
  MISC_FEATURE (136): Xaa equals any of the twenty naturally occurring L-amino acids
MASLGLQLVGYILGLLGLLGTLVAMLLPSWKTSSYVGASIVTAVGFSKGLWMECATHSTGITQCDIYSTLLGLPADIQAAQAMMVTSSAISSLACIISVVGMRCTVFCQESRAKDRVAVAGGVFFILGSLLGFIPXAWNL

SEQ ID NO: 2617 - protein, 115 aa, Homo sapiens
MAVAVLLCGCIVATVSFFWEESLTQHVAGLLFLMTGIFCTISLCTYAASISYDLNRLPKLIYSLPADVEHGYSWSIFCAWCSLGFIVAAGGLCIAYPFISRTKIAQLKSGRDSTV

SEQ ID NO: 2618 - protein, 366 aa, Homo sapiens
  MISC_FEATURE (66): Xaa equals any of the twenty naturally occurring L-amino acids
  MISC_FEATURE (116): Xaa equals any of the twenty naturally occurring L-amino acids
MPGILWMEPTQPPDFALAYRPSFPEDREPQIPYPEPTWPPPLSAPRVPYHSSVLSVTRPVVVSATXPTLPSAHQPPVIPATHPALSRDHQIPVIAANYPDLPSAYQPGILSVSHSXQPPAHQPPMISTKYPELFPAHQSPMFPDTRVAGTQTTTHLPGIPPNHAPLVTTLGAQLPPQAPDALVLRTQATQLPIIPTAQPSLTTTSRSPVSPAHQISVPAATQPAALPTLLPSQSPTNQTSPISPTHPHSKAPQIPREDGPSPKLALWLPSPAPTAAPTALGEAGLAEHSQRDDRWLLVALLVPTCVFLVVLLALGIVYCTRCGPHAPNKRITDCYRWVIHAGSKSPTEPMPPRGSLTGVQTCRTSV

SEQ ID NO: 2619 - protein, 834 aa, Homo sapiens
MKHTLALLAPLLGLGLGLALSQLAAGATDCKFLGPAEHLTFTPAARARWLAPRVRAPGLLDSLYGTVRRFLSVVQLNPFPSELVKALLNELAFVKVNEVVRYEAGYVVCAVIAGLYLLLVPTAGLCFCCCRCHRRCGGRVKTEHKALACERAALMVFLLLTTLLLLIGVVCAFVTNQRTHEQMGPSIEAMPETLLSLWGLVSDVPQELQAVAQQFSLPQEQVSEELDGVGVSIGSAIHTQLRSSVYPLLAAVGSLGQVLQVSVHHLQTLNATVVELQAGQQDLEPAIREHRDRLLELLQEARCQGDCAGALSWARTLELGADFSQVPSVDHVLHQLKGVPEANFSSMVQEENSTFNALPALAAMQTSSVVQELKKAVAQQPEGVRTLAEGFPGLEAASRWAQALQEVEESSRPYLQEVQRYETYRWIVGCVLCSVVLFVVLCNLLGLNLGIWGLSARDDPSHPEAKGEAGARFLMAGVGLSFLFAAPLILLVFATFLVGGNVQTLVCRSWENGELFEFADTPGNLPPSMNLSQLLGLRKNISIHQAYQQCKEGAALWTVLQLNDSYDLEEHLDINQYTNKLRQELQSLKVDTQSLDLLSSAARRDLEALQSSGLQRIHYPDFLVQIQRPVVKTSMEQLAQELQGLAQAQDNSVLGQRLQEEAQGLRNLHQEKVVPQQSLVAKLNLSVRALESSAPNLQLETSDVLANVTYLKGELPAWAARILRNVSECFLAREMGYFSQYVAWVREEVTQRIATCQPLSGALDNSRVILCDMMADPWNAFWFCLAWCTFFLIPSIIFAVKTSKYFRPIRKRLSSTSSEETQLFHIPRVTSLKL

SEQ ID NO: 2620 - protein, 161 aa, Homo sapiens
MTPRVPMERELSFYGLTALALMLGTSLIYWTLFTLGLDLSWSISLAFKWCERPEWIHVDSRPFASLSRDSGAALGLGIALHSPCYAQVRRAQLGNGQKIACLVLAMGLLGPLDWLGHPPQISLFYIFNFLKYTLWPCLVLALVPWAVHMFSAQEAPPIHSS

SEQ ID NO: 2621 - protein, 603 aa, Homo sapiens
  MISC_FEATURE (174): Xaa equals any of the twenty naturally occurring L-amino acids
  MISC_FEATURE (390): Xaa equals any of the twenty naturally occurring L-amino acids
MLSLYEKIKIRLIILFLLAALSFIGLFFIINYQLVSERAVKRADSRFELIQKNVGYFFKDIERSALTLKDSLYLLKNTEEIQRAVILKMEMMPFLDSVGLVLDDNKYYLFSRRANDKIVVYHQEQVNGPLVDESGRVIFADFNPSKRPWSVASDDSNNSWNPAYNCFDRPGKKXISFTLHINGKDHDLLAVDKIHVDLNWRYLNEYLDQISANDEVLFLKQGHEIIAKNQLAREKLIIYNSEGNYNIIDSVDTEYIEKTSAVPNNALFEIYFYYPGGNLLNASDKLFYLPFAFIIIVLLVVYLMTTRVFRRQFSEMTELVNTLAFLPDSTDQIEALKIREGDAKEIISIKNSIAEMKDAEIERSNKLLSLISYDQESGFIKNMAIIESNXNQYLAVGIIKLCGLEAVEAVFGVDERNKIVRKLCQRIAEKYAQCCDIVTFNADLYLLLCRENVQTFTRKIAMVNDFDSSFGYRNLRIHKSAICEPLQGENAWSYAEKLKLAISSIRDHMFSEFIFCDDAKLNEIEENIWIARNIRHAMEIGELFLVYQPIVDINTRAILGAEALCRWVSAERGIISPLKFITIAEDIGFINELGYQIIKTAMG

SEQ ID NO: 2622 - protein, 172 aa, Homo sapiens
MDSPSLRELQQPLLEGTECETPAQKPGRHELGSPLREIAFAESLRGLQFLSPPLPSVSAGLGEPRPPDVEDMSSSDSDSDWDGGSRLSPFLPHDHLGLAVFSMLCCFWPVGIAAFCLAQKTNKAWAKGDIQGAGAASRRAFLLGVLAVGLGVCTYAAALVTLAAYLASRDPP

SEQ ID NO: 2623 - protein, 107 aa, Homo sapiens
  MISC_FEATURE (24): Xaa equals any of the twenty naturally occurring L-amino acids
  MISC_FEATURE (28): Xaa equals any of the twenty naturally occurring L-amino acids
  MISC_FEATURE (35): Xaa equals any of the twenty naturally occurring L-amino acids
MRSPMRWATLPSCSGPALTDGASXAATXNSAGGPXGPLFAICTQSPKGVEETAAWVLPFTSGGFLYIALVNVLPDLLEEEDPWRSLQQLLLLCAGIVVMVLFSLFVD

SEQ ID NO: 2624 - protein, 246 aa, Homo sapiens
  MISC_FEATURE (222): Xaa equals any of the twenty naturally occurring L-amino acids
  MISC_FEATURE (223): Xaa equals any of the twenty naturally occurring L-amino acids
  MISC_FEATURE (236): Xaa equals any of the twenty naturally occurring L-amino acids
  MISC_FEATURE (242): Xaa equals any of the twenty naturally occurring L-amino acids
  MISC_FEATURE (244): Xaa equals any of the twenty naturally occurring L-amino acids
MGAAVFFGCTFVAFGPAFALFLITVAGDPLRVIILVAGAFFWLVSLLLASVVWFILVHVTDRSDARLQYGLLIFGAAVSVLLQEVFRFAYYKLLKKADEGLASLSEDGRSPISIRQMAYVSGLSFGIISGVFSVINILADALGPGVVGIHGDSPYYFLTSAFLTAAIILLHTFWGVVFFDACERRRYWALGLVVGSHLLTSGLTFLNPWYEASLLPSMQSLXXWGSGPSSQLEGPXKYSAQXLXKD

SEQ ID NO: 2625 - protein, 389 aa, Homo sapiens
MWIKFSSDEELEGLGFRAKYSFIPDPDFTYLGGILNPIPDCQFELSGADGIVRSSQVEQEEKTKPGQAVDCIWTIKATPKAKIYLRFLDYQMEHSNECKRNFVAVYDGSSSIENLKAKFCSTVANDVMLKTGIGVIRMWADEGSRLSRFRMLFTSFVEPPCTSSTFFCHSNMCINNSLVCNGVQNCAYPWDENHCKEKKKAGVFEQITKTHGTIIGITSGIVLVLLIISILVQVKQPRKKVMACKTAFNKTGFQEVFDPPHYELFSLRDKEISADLADLSEELDNYQKMRRSSTASRCIHDHHCGSQASSVKQSRTNLSSMELPFRNDFAQPQPMKTFNSTFKKSSYTFKQGHECPEQALEDRVMEEIPCEIYVRGREDSAQASISIDF

SEQ ID NO: 2626 - protein, 258 aa, Homo sapiens
  MISC_FEATURE (3): Xaa equals any of the twenty naturally occurring L-amino acids
  MISC_FEATURE (182): Xaa equals any of the twenty naturally occurring L-amino acids
MLXANPPPFKSVWSRLDGQWPDGLLASDNTLHFVHPLTFNYSGVYICKVTNSLGQRSDQKVIYISDPPTTTTLQPTIQWHPSTADIEDLATEPKKLPFPLSTLATIKDDTIATIIASVVGGALFIVLVSVLAGIFCYRRRRTFRGDYFAKNYIPPSDMQKESQIDVLQQDELDSYPDSVKKXNKNPVNNLIRKDYLEEPEKTQWNNVENLNRFERPMDYYEDLKMGMKFVSDEHYDENEDDLVSHVDGSVISRREWYV

SEQ ID NO: 2627 - protein, 284 aa, Homo sapiens
MPRYAQLVMGPAGSGKSTYCATMVQHCEALNRSVQVVNLDPAAEHFNYSVMADIRELIEVDDVMEDDSLRFGPNGGLVFCMEYFANNFDWLENCLGHVEDDYILFDCPGQIELYTHLPVMKQLVQQLEQWEFRVCGVFLVDSQFMVESFKFISGILAALSAMISLEIPQVNIMTKMDLLSKKAKKEIEKFLDPDMYSLLEDSTSDLRSKKFKKLTKAICGLIDDYSMVRFLPYDQSDEESMNIVLQHIDFAIQYGEDLEFKEPKEREDESSSMFDEYFQECQDE

SEQ ID NO: 2628 - protein, 469 aa, Homo sapiens
  MISC_FEATURE (396): Xaa equals any of the twenty naturally occurring L-amino acids
  MISC_FEATURE (405): Xaa equals any of the twenty naturally occurring L-amino acids
  MISC_FEATURE (410): Xaa equals any of the twenty naturally occurring L-amino acids
  MISC_FEATURE (466): Xaa equals any of the twenty naturally occurring L-amino acids
MANAEVSVPVGDVVVVPTEGNEGENPEDTKTQVILQLQPVQQGIYEAGSENNTAVVAVETHTIHKIEEGIDTGTIEANEDMEIAYPITCGESKAILLWKKFVCPGINVKCVKFNDQLISPKHFVHLAGKSTLKDWKRAIRLGGIMLRKMMDSGQIDFYQHDKVCSNTCRSTKFDLLISSARAPVPGQQTSVVQTPTSADGSITQIAISEESMEEAGLEWNSALTAAVTMATEEGVKKDSEEISEDTLMFWKGIADVGLMEEVVCNIQKEIEELLRGVQQRLIQAPFQVTDAAVLNNVAHTFGLMDTVKKVLDNRRNQVEQGEEQFLYTLTDLERQLEEQKKQGQDHRLKSQTVQNVVLMPVSTPKPPKRPRLQRPASTTVLSPSPPVQQPQFTVIXPIHHHPSGXSHFSXGQYFQWATLSQGLQFLWTVPHIAFLGLQVFSVMATVGFSFWPRRQVLTRTQLNHSXLSF

SEQ ID NO: 2629 - protein, 279 aa, Homo sapiens
MECDDLKELPEPTPVKTRLPPEIFGDALMVLEFLNAFGELFDLQDEFPDGVTLEVLEEALVGNDSEGPLCELLFFFLTAIFQAIAEEEEEVAKEQLTDADTKDLTEALDEDADPTKSALSAVASLAAAWPQLHQGCSLKSLDLDSCTLSEILRLHILASGADVTSANAKYRYQKRGGFDATDDACMELRLSNPSLVKKLSSTSVYDLTPGEKMKILHALCGKLLTLVSTRDFIEDYVDILRQAKQEFRELKAEQHRKEREEAAARIRKRKEEKLKEQSY

SEQ ID NO: 2630 - protein, 269 aa, Homo sapiens
  MISC_FEATURE (173): Xaa equals any of the twenty naturally occurring L-amino acids
  MISC_FEATURE (184): Xaa equals any of the twenty naturally occurring L-amino acids
  MISC_FEATURE (201): Xaa equals any of the twenty naturally occurring L-amino acids
  MISC_FEATURE (217): Xaa equals any of the twenty naturally occurring L-amino acids
  MISC_FEATURE (236): Xaa equals any of the twenty naturally occurring L-amino acids
  MISC_FEATURE (246): Xaa equals any of the twenty naturally occurring L-amino acids
  MISC_FEATURE (254): Xaa equals any of the twenty naturally occurring L-amino acids
MEVPPPAPRSFLCRALCLFPRVFAAEAVTADSEVLEERQKRLPYVPEPYYPESGWDRLRELFGKDEQQRISKDLANICKTAATAGIIGWVYGGIPAFIHAKQQYIEQSQAEIYHNRFDAVQSAHRAATRGFIRYGWRWGWRTAVFVTIFNTVNTSLNVYRNKDALSHFVIAGXVTGSLFRINVXLRGLVAGGIIGALLGTXVGGLLMAFQKYSGETXQERKQKDRKALHELKLEEXKADYKLLSTXLRKLKVVXRKMNLRMMLRKLKHC

SEQ ID NO: 2631 - protein, 666 aa, Homo sapiens
  MISC_FEATURE (58): Xaa equals any of the twenty naturally occurring L-amino acids
  MISC_FEATURE (254): Xaa equals any of the twenty naturally occurring L-amino acids
  MISC_FEATURE (347): Xaa equals any of the twenty naturally occurring L-amino acids
MKPDIVTYGAGVRGSGVKGGCRALSGTSVASPVVAGAVTLLVSTVQKRELVNPASMKXALIASARRLPGVNMFEQGHGKLDLLRAYQILNSYKPQASLSPSYIDLTECPYMWPYCSQPIYYGGMPTVVNVTILNGMGVTGRIVDKPDWQPYLPQNGDNIEVAFSYSSVLWPWSGYLAISISVTKKAASWEGIAQGHVMITVASPAETESKNGAEQTSTVKLPIKVKIIPTPPRSKRVLWDQYHNLRYPPGYFPXDNLRMKNDPLDWNGDHIHTNFRDMYQHLRSMGYFVEVLGAPFTCFDASQYGTLLMVDSEEEYFPEEIAKLRRDVDNGLSLVIFSDWYNTSVMXKVKFYDENTRQWWMPDTGGANIPALNELLSVWNMGFSDGLYEGEFTLANHDMYYASGCSIAKFPEDGVVITQTFKDQGLEVLKQETAVVENVPILGLYQIPAEGGGRIVLYGDSNCLDDSHRQKDCFWLLDALLQYTSYGVTPPSLSHSGNRQRPPSGAGSVTPERMEGNHLHRYSKVLEAHLGDPKPRPLPACPRLSWAKPQPLNETAPSNLWKHQKLLSIDLDKVVLPNFRSNRPQVRPLSPGESGAWDIPGGIMPGRYNQEVGQTIPVFAFLGAMVVLAFFVVQINKAKSRPKRRKPRVKRPQLMQQVHPPKTPSV

SEQ ID NO: 2632 - protein, 240 aa, Homo sapiens
MRRCSLCAFDAARGPRRLMRVGLALILVGHVNLLLGAVLHGTVLRHVANPRGAVTPEYTVANVISVGSGLLSVSVGLVALLASRNLLRPPLHWVLLALALVNLLLSVACSLGLLLAVSLTVANGGRRLIADCHPGLLDPLVPLDEGPGHTDCPFDPTRIYDTALALWIPSLLMSAGEAALSGYCCVAALTLRGVGPCRKDGLQGQLEEMTELESPKCKRQENEQLLDQNQEIRASQRSWV

SEQ ID NO: 2633 - protein, 266 aa, Homo sapiens
MAAAALHYGWRAGMMIAGCMAIVVGIFLCWRLRDRPQALGLPAVGEWRHDALEIAQQQEGAGLTRKEILTKYVLLNPYIWLLSFCYVLVYVVRAAINDWGNLYMSETLGVDLVTANTAVTMFELGGFIGALVAGWGSDKLFNGNRGPMNLIFAAGILLSVGSLWLMPFASYVMQATCFFTIGFFVFGPQMLIGMAAAECSHKEAAGAATGFVGLFAYLGASLAGWPLAKVLDTWHWSGFFVVISIAAGISALLLLPFLNAQTPREA

SEQ ID NO: 2634 - protein, 162 aa, Homo sapiens
MGGGVGSAEYVATFLYRTHFFAPMSIRSDKIKDINLMFPWPALRCAGTNRLYLLYFFFPFFLKRSLAQSPRLEGSGAISAHCRLRLPGSRRSPASASRIAGTTGARHYARLIFCVFLVEAGFHHVGLELLTSGDPPALASQSAGITGVSHCVRPLYFFELQT

SEQ ID NO: 2635 - protein, 156 aa, Homo sapiens
MAFNIIAMFFVIAPDQQYLRFSRLAVLFRFVMTSPPASCRALSRQVFQLKLENIFDNRPFKAYRVILFSLWTVAGHMLGGVIQPANKGYTRVDHHNFAMHPAKHIGAHTKKARAGIVVAEHYASCRQFIDKLIAEIRRTVAIQQDFRFNPALRCCQ

SEQ ID NO: 2636 - protein, 201 aa, Homo sapiens
MSTEAQRVDDSPSTSGGSSDGDQRESVQQEPEREQVQPKKKEGKISSKTAAKLSTSAKRIQKELAEITLDPPPNCSAGPKGDNIYEWRSTILGPPGSVYEGGVFFLDITFSPDYPFKPPKVTFRTRIYHCNINSQGVICLDILKDNWSPALTISKVLLSICSLLTDCNPADPLVGSIATQYMTNRAEHDRMARQWTKRYAT

SEQ ID NO: 2637 - protein, 108 aa, Homo sapiens
MFVSVTAFFFSLLFLGMFLSGMVAQIDANWNFLDFAYHFTVFVFYFGAFLLEAAATSLHDLHCNTTITGQPLLSDNQYNINVAASIFAFMTTACYGCSLGLALRRWRP

SEQ ID NO: 2638 - protein, 244 aa, Homo sapiens
  MISC_FEATURE (158): Xaa equals any of the twenty naturally occurring L-amino acids
  MISC_FEATURE (164): Xaa equals any of the twenty naturally occurring L-amino acids
  MISC_FEATURE (165): Xaa equals any of the twenty naturally occurring L-amino acids
  MISC_FEATURE (179): Xaa equals any of the twenty naturally occurring L-amino acids
  MISC_FEATURE (185): Xaa equals any of the twenty naturally occurring L-amino acids
MRLRFWLLIWLLLGFISHQPTPVINTLADHRHRETDFGGSPWIIIIIVFLGRYKFTILFCTIYLCVPFLKTIFWSRNGHDRSRDVQQRARRSNRCRQEGIKIGLEDICTLWKQAETKVQAKIRKMKVTKKVNHHYKINGKRKTAKEQKMFQRAQELRXRAEDYXXCKITPSARKPLCNXVRMAAXEHRHSSGLPYWPYLTAETLKNRMGHQPPPPTQQHSIIDNSLSLKTPSECVLYPLATLSG

SEQ ID NO: 2639 - protein, 200 aa, Homo sapiens
MALALAALAAVEPACGSRYQQLQNEEESGEPEQAAGDAPPPYSSISAESAAYFDYKDESGFPKPPSYNVATTLPSYDEAERTKAEATIPLVPGRDEDFVGRDDFDDADQLRIGNDGIFMLTFFMAFLFNWIGFFLSFCLTTSAAGRYGAISGFGLSLIKWILIVRFSTYFPAFMNSLSRSKRTPAGSESRCRTQRNNHLL

SEQ ID NO: 2640 - protein, 115 aa, Homo sapiens
  MISC_FEATURE (15): Xaa equals any of the twenty naturally occurring L-amino acids
MITKNKNESSKPNFXFSPFSFFSQDVPLISLANILHNAKLWNDAVIVATMAVEIAPHFAVNHFTLGNVYVAMEEFEKALVWYESTLKLQPEFVPAKNRIQTIQCHLMLKKGRRSP

SEQ ID NO: 2641 - protein, 455 aa, Homo sapiens
MDRFTVAGVLPDIEQFFNIGDSSSGLIQTVFISSYMVLAPVFGYLGDRYNRKYLMCGGIAFWSLVTLGSSFIPGEHFWLLLLTRGLVGVGEASYSTIAPTLIADLFVADQRSRMLSIFYFAIPVGSGLGYIAGSKVKDMAGDWHWALRVTPGLGVVAVLLLFLVVREPPRGAVERHSDLPPLNPTSWWADLRALARNPSFVLSSLGFTAVAFVTGSLALWAPAFLLRSRVVLGETPPCLPGDSCSSSDSLIFGLITCLTGVLGVGLGVEISRRLRHSNPRADPLVCATGLLGSAPFLFLSLACARGSIVATYIFIFIGETLLSMNWAIVADILLYVVIPTRRSTAEAFQIVLSHLLGDAGSPYLIGLISDRLRRNWPPSFLSEFRALQFSLMLCAFVGALGGAAFLGTAIFIEADRRRAQLHVQGLLHEAGSTDDRIVVPQRGRSTRVPVASVLI

SEQ ID NO: 2642 - protein, 295 aa, Homo sapiens
MTIIISVIVAIALAIGYLAVAKEKWTSTAIITQPDVGQIAGYNNAMNVIYGQAAPKVSDLQETLIGRFSSAFSALAETLDNQEEREKLTIEPSVKNQQLPLTVSYVGQTAEGAQMKLAQYIQQVDDKVNQELEKDLKDNIALGRKNLQDSLRTQEVVAQEQKDLRIRQIQEALQYANQAQVTKPQIQQTGEDITQDTLFLLGSEALESMIKHEATRPLVFSPNYYQTRQNLLDIESLKVDDLDIHAYRYVMKPMLPIRRDSPKKAITLILAVLLGGMVGAGIVLGRNALRNYNAK

SEQ ID NO: 2643 - protein, 194 aa, Homo sapiens
  MISC_FEATURE (13): Xaa equals any of the twenty naturally occurring L-amino acids
  MISC_FEATURE (29): Xaa equals any of the twenty naturally occurring L-amino acids
  MISC_FEATURE (160): Xaa equals any of the twenty naturally occurring L-amino acids
  MISC_FEATURE (186): Xaa equals any of the twenty naturally occurring L-amino acids
  MISC_FEATURE (190): Xaa equals any of the twenty naturally occurring L-amino acids
MQDAPLSCLSPTXWSSVSSADSTEKSASXAGTRNLPFQFCLRQALRMKAAGILTLIGCLVTGAESKIYTRCKLAKIFSRAGLDNYWGFSLGNWICMAYYESGYNTTAQTVLDDGSIDYGIFQINSFAWCRRGKLKENNHCHVACSALVTDDLTDAIICAXKIVKETQGMNYWQGWKKHCEGRDLSXWKKXCEVS

SEQ ID NO: 2644 - protein, 194 aa, Homo sapiens [sequence omitted]

SEQ ID NO: 2645 - protein, 239 aa, Homo sapiens
MAYQSLRLEYLQIPPVSRAYTTACVLTTAAVQLELITPFQLYFNPELIFKHFQIWRLITNFLFFGPVGFNFLFNMIFLYRYCRMLEEGSFRGRTADFVFMFLFGGFLMTLFGLFVSLVFLGQAFTIMLVYVWSRRNPYVRMNFFGLLNFQAPFLPWVLMGFSLLLGNSIIVDLLGIAVGHIYFFLEDVFPNQPGGIRILKTPSILKAIFDTPDEDPNYNPLPEERPGGFAWGEGQRLGG

SEQ ID NO: 2646 - protein, 202 aa, Homo sapiens
  MISC_FEATURE (93): Xaa equals any of the twenty naturally occurring L-amino acids
MAAPWRRWPTGLLAVLRPLLTCRPLQGTTLQRDVLLFEHDRGRFFTILGLFCAGQGVFWASMAVAAVSRPPVPVQPLDAEVPNRGPFDLRSAXWRYGLAVGCGAIGALVLGAGLLFSLRSVRSVVLRAGGQQVTLTTHAPFGLGAHFTVPLKQVSCMAHRGEVPAMLPLKVKGRRFYFLLDKTGHFPNTKLFDNTVGAYRSL

SEQ ID NO: 2647 - protein, 307 aa, Homo sapiens
MKEDCLPSSHVPISDSKSIQKSELLGLLKTYNCYHEGKSFQLRHREEEGTLIIEGLLNIAWGLRRPIRLQMQDDREQVHLPSTSWMPRRPSCPLGCWSLLLGLSSLSLPAAISALQLSVFRKEPSPQNGNITAQGPSIQPVHKAESSTDSSGPLEEAEEAPQLMRTKSDASCMSQRRPKCRAPGEAQRIRRHRFSINGHFYNHKTSVFTPAYGSVTNVRVNSTMTTLQVLTLLLNKFRVEDGPSEFALYIVHESGERTKLKDCEYPLISRILHGPCEKIARIFLMEADLGVEVPHEVSGGQGWGGLL

SEQ ID NO: 2648 - protein, 193 aa, Homo sapiens
  MISC_FEATURE (143): Xaa equals any of the twenty naturally occurring L-amino acids
MIRCGLACERCRWILPLLLLSAIAFDIIALAGRGWLQSSDHGQTSSLWWKCSQEGGGSGSYEEGCQSLMEYAWGRAAAAMLFCGFIILVICFILSFFALCGPQMLVFLRVIGGLLALAAVFQIISLVIYPVKYTQTFTLHANXAVTYIYNWAYGFGWAATIILIGCAFFFCCLPNYEDDLLGNAKPRYFYTSA

SEQ ID NO: 2649 - protein, 112 aa, Homo sapiens
  MISC_FEATURE (68): Xaa equals any of the twenty naturally occurring L-amino acids
  MISC_FEATURE (70): Xaa equals any of the twenty naturally occurring L-amino acids
  MISC_FEATURE (73): Xaa equals any of the twenty naturally occurring L-amino acids
  MISC_FEATURE (78): Xaa equals any of the twenty naturally occurring L-amino acids
  MISC_FEATURE (79): Xaa equals any of the twenty naturally occurring L-amino acids
  MISC_FEATURE (80): Xaa equals any of the twenty naturally occurring L-amino acids
  MISC_FEATURE (89): Xaa equals any of the twenty naturally occurring L-amino acids
MPGQEDEGALWTQQSAEFRSGKPMVAGTPCFLPLLSACVTHINGNNFFQLLAEVGEAGSLHREGLSLXCXPLXSVLAXXXGSSILSFPXLPLWTGVLPFQFLCFGVFPYLLT

SEQ ID NO: 2650 - protein, 186 aa, Homo sapiens
MLVMDCHRTHLSEEVLAMLSASSTLPAVVPAGCSSKIQPLDVCIKRTVKNFLHKKWKEQAREMADTACDSDVLLQLVLVWLGEVLGVIGDCPELVQRSFLVASVLPGPDGNINSPTRNADMQEELIASLEEQLKLSGEHSESSTPRPRSSPEETIEPESLHQLFEGESETESFYGFEEADLDLMEI

SEQ ID NO: 2651 - protein, 300 aa, Homo sapiens
  MISC_FEATURE (234): Xaa equals any of the twenty naturally occurring L-amino acids
  MISC_FEATURE (252): Xaa equals any of the twenty naturally occurring L-amino acids
  MISC_FEATURE (263): Xaa equals any of the twenty naturally occurring L-amino acids
  MISC_FEATURE (277): Xaa equals any of the twenty naturally occurring L-amino acids
MVKTFEDRMDLFSALIKGPTRTPYEDGLYLFDIQLPNIYPAVPPHFCYLSQCSGRLNPNLYDNGKVCVSLLGTWIGKGTERWTSKSSLLQVLISIQGLILVNEPYYNEAGFDSDRGLQEGYENSRCYNEMALIRVVQSMTQLVRRPPEVFEQEIRQHFSTGGWRLVNRIESWLETHALLEKAQALPNGVPKASSSPEPPAVAELSDSGQQEPEDGGPAPGEASQGSDSEGGAQXLASASRDHTDQTSETAPXASVPPSVKPKXRRKEATGASYLRRXATLTSASPSSHFPRVSSRASGVS

SEQ ID NO: 2652 - protein, 156 aa, Homo sapiens
  MISC_FEATURE (149): Xaa equals any of the twenty naturally occurring L-amino acids
  MISC_FEATURE (152): Xaa equals any of the twenty naturally occurring L-amino acids
MFPQCKFSREFLHPRYWLTWFGLGVLWLWVQLPYPVLCFLGTRIGAMARPFLKRRESIARKNLELCFPQHSAEEREKMIAENFRSLGMALVETGMAWFWPDSRVRKWFDVEGLDNLKRAQMQNRGVMVVGVHFMSLELGGALKDPPRAXLTXHRRP

SEQ ID NO: 2653 - protein, 237 aa, Homo sapiens
  MISC_FEATURE (36): Xaa equals any of the twenty naturally occurring L-amino acids
MTSEITYAEVRFKNEFKSSGINTASSAASKERTAPXKSNTGFPKLLCASLLIFFLLLAISFFIAFVIFFQKYSQLLEKKTTKELVHTTLECVKKNMPVEETAWSCCPKNWKSFSSNCYFISTESASWQDSEKDCARMEAHLLVINTQEEQDFIFQNLQEESAYFVGLSDPEGQRHWQWVDQTPYNESSTFWHPREPSDPNERCVVLNFRKSPKRWGWNDVNCLGPQRSVCEMMKIHL

SEQ ID NO: 2654 - protein, 363 aa, Homo sapiens
  MISC_FEATURE (10): Xaa equals any of the twenty naturally occurring L-amino acids
  MISC_FEATURE (159): Xaa equals any of the twenty naturally occurring L-amino acids
  MISC_FEATURE (160): Xaa equals any of the twenty naturally occurring L-amino acids
  MISC_FEATURE (168): Xaa equals any of the twenty naturally occurring L-amino acids
MDILTLAHTXTEAKGLSSESSASSDGPHPVITPSRASESSASSDGPHPVITPSWSPGSDVTLLAEALVTVTNIEVINCSITEIETTTSSIPGASDIDLIPTEGVKASSTSDPPALPDSTEAKPHITEVTASAETLSTAGTTESAAPHATVGTPLPTNSXXEREVTAPXATTLSGALVTVSRNPLEETSALSVETPSYVKVSGAAPVSIEAGSAVGKTTSFAGSSASSYSPSEAALKNFTPSETPTMDIATKGPFPTSRDPLPSVPPTTTNSSRGTNSTLAKITTSAKTTMKPPTATPTTARTRPTTDVSAGENGGFLLLRLSVASPEDLTDPRVAERLMQQLHRELHAHAPHFQVSLLRVRRG

SEQ ID NO: 2655 - protein, 148 aa, Homo sapiens
MHCPTVPDEKNHYEKSSGSSEGQSKTESDFSNLDSEKHKKGPMETGLFPGSNATFRILEVGCGAGNSVFPILNTLENSPESFLYCCDFASGAVELVKSHSSYRATQCFAFVHDVCDDGLPYPFPDGILDVILLVFVLSSIHPDRTLFI

SEQ ID NO: 2656 - protein, 230 aa, Homo sapiens
MEPLRLLILLFVTELSGAHNTTVFQGVAGQSLQVSCPYDSMKHWGRRKAWCRQLGEKGPCQRVVSTHNLWLLSFLRRWNGSTAITDDTLGGTLTITLRNLQPHDAGLYQCQSLHGSEADTLRKVLVEVLADPLDHRDAGDLWFPGESESFEDAHVEHSISRSLLEGEIPFPPTSILLLLACIFLIKILAASALWAAAWHGQKPGTHPPSELDCGHDPGYQLQTLPGLRDT

SEQ ID NO: 2657 - protein, 240 aa, Homo sapiens
MGNCQAGHNLHLCLAHHPPLVCATLILLLLGLSGLGLGSFLLTHRTGLRSPDIPQDWVSFLRSFGQLTLCPRNGTVTGKWRGSHVVGLLTTLNFGDGPDRNKTRTFQATVLGSQMGLKGSSAGQLVLITARVTTERTAGTCLYFSAVPGILPSSQPPISCSEEGAGNATLSPRMGEECVSVWSHEGLVLTKLLTSEELALCGSRLLVLGSFLLLFCGLLCCVTAMCFHPRRESHWSRTRL

SEQ ID NO: 2658 - protein, 271 aa, Homo sapiens
  MISC_FEATURE (9): Xaa equals any of the twenty naturally occurring L-amino acids
MASADSRRXADGGGAGGTFQPYLDTLRQELQQTDPTLLSVVVAVLAVLLTLVFWKLIRSRRSSQRAVLLVGLCDSGKTLLFVRLLTGLYRDTQTSITDSCAVYRVNNNRGNSLTLIDLPGHESLRLQFLERFKSSARAIVFVVDSAAFQREVKDVAEFLYQVLIDSMGLKNTPSFLIACNKQDIAMAKSAKLIQQQLEKELNTLRVTRSAAPSTLDSSSTAPAQLGKKGKEFEFSQLPLKVEFLECSAKGGRGDVGSADIQDLEKWLAKIA

SEQ ID NO: 2659 - protein, 196 aa, Homo sapiens
  MISC_FEATURE (160): Xaa equals any of the twenty naturally occurring L-amino acids
  MISC_FEATURE (174): Xaa equals any of the twenty naturally occurring L-amino acids
  MISC_FEATURE (177): Xaa equals any of the twenty naturally occurring L-amino acids
  MISC_FEATURE (178): Xaa equals any of the twenty naturally occurring L-amino acids
  MISC_FEATURE (179): Xaa equals any of the twenty naturally occurring L-amino acids
  MISC_FEATURE (184): Xaa equals any of the twenty naturally occurring L-amino acids
  MISC_FEATURE (186): Xaa equals any of the twenty naturally occurring L-amino acids
  MISC_FEATURE (193): Xaa equals any of the twenty naturally occurring L-amino acids
MGFNLTLAKLPNNELHGQESHNSGNRSDGPGKNTTLHNEFDTIVLPVLYLIIFVASILLNGLAVWIFFHIRNKTSFIFYLKNIVVADLIMTLTFPFRIVHDAGFGPWYFKFILCRYTSVLFYANMYTSIVFLGLISIDRYLKVVKPFGDSRMYSITFTKXLSVCVWVIMAGLLXQTXXXQMVKXTXGQIFLNXFKT

SEQ ID NO: 2660 - protein, 133 aa, Homo sapiens
MWPQFRTIQEKEVIILNNKECDNFYHNFTKIPTLVQIIKSQMMCAEDTHREKFCYELTGEPLVCSMEGTWYLVGLVSWGAGCQKSEAPPIYLQVSSYQHWIWDCLNGQALALPAPSRTLLLALPLPLSLLAAL

SEQ ID NO: 2661 - protein, 307 aa, Homo sapiens
  MISC_FEATURE (42): Xaa equals any of the twenty naturally occurring L-amino acids
  MISC_FEATURE (165): Xaa equals any of the twenty naturally occurring L-amino acids
  MISC_FEATURE (244): Xaa equals any of the twenty naturally occurring L-amino acids
  MISC_FEATURE (247): Xaa equals any of the twenty naturally occurring L-amino acids
  MISC_FEATURE (297): Xaa equals any of the twenty naturally occurring L-amino acids
MGTQEGWCLLLCLALSGAAETKPHPAEGQWRAVDVVLDCFLXKDGAHRGALASSEDRARASLVLKQVPVLDDGSLEDFTDFQGGTLAQDDPPIIFEASVDLVQIPQAEALLHADCSGKEVTCEISRYFLQMTETTVKTAAWFMANMQVSGGGPSISLVMKTPRVXKNEALWHPTLNLPLSPQGTVRTAVEFQVMTQTQSLSFLLGSSASLDCGFSMAPGLDLISVEWRLQHKGRGQLVYSWTAXQGXAVRKGATWTCTTGHGRMLLTCRLIYRQGLLAIHSLRLTISLTPLLIILEXFSPSQCVYLM

SEQ ID NO: 2662 - protein, 122 aa, Homo sapiens
  MISC_FEATURE (11): Xaa equals any of the twenty naturally occurring L-amino acids
  MISC_FEATURE (16): Xaa equals any of the twenty naturally occurring L-amino acids
MTMITPSSKLXLTKGXKSWSSTAVAAALELVDPPGCRNSARDQDFFFITQPMTMYIEVSLRTKDVHTCFKVVLVMIIRIIRGTKYQMQENGPECQYNQNKKCINSDLLEAEINSFLDAFLVF

SEQ ID NO: 2663 - protein, 201 aa, Homo sapiens [sequence omitted]

SEQ ID NO: 2664 - protein, 273 aa, Homo sapiens
MLFFCGDLLSRSQIFYYSTGMTVGIVASLLIIIFILSKFMPKKSPIYVILVGGWSFSLYLIQLVFKNLQEIWRCYWQYLLSYVLTVGFMSFAVCYKYGPLENERSINLLTWTLQLMGLCFMYSGIQIPHIALAIIIIALCTKNLEHPIQWLYITCRKVCKGAEKPVPPRLLTEEEYRIQGEVETRKALEELREFCNSPDCSAWKTVSRIQSPKRFADFVEGSSHLTPNEVSVHEQEYGLGSIIAQDEIYEEASSEEEDSYSRCPAITQNNFLT

SEQ ID NO: 2665 - protein, 322 aa, Homo sapiens
  MISC_FEATURE (83): Xaa equals any of the twenty naturally occurring L-amino acids
MARCFSLVLLLTSIWTTRLLVQGSLRAEELSIQVSCRIMGITLVSKKANQQLNFTEAKEACRLLGLSLAGKDQVETALKASFXTCSYGWVGDGFVVISRISPNPKCGKNGVGVLIWKVPVSRQFAAYCYNSSDTWTNSCIPEIITTKDPIFNTQTATQTTEFIVSDSTYSVASPYSTIPAPTTTPPAPASTSIPRRKKLICVTEVFMETSTMSTETEPFVENKAAFKNEAAGFGGVPTALLVLALLFFGAAAGLGFCYVKRYVKAFPFTNKNQQKEMIETKVVKEEKANDSNPNEESKKTDKNPEESKSPSKTTVRCLEAEV

SEQ ID NO: 2666 - protein, 299 aa, Homo sapiens
MGTKAQVERKLLCLFILAILLCSLALGSVTVHSSEPEVRIPENNPVKLSCAYSGFSSPRVEWKFDQGDTTRLVCYNNKITASYEDRVTFLPTGITFKSVTREDTGTYTCMVSEEGGNSYGEVKVKLIVLVPPSKPTVNIPSSATIGNRAVLTCSEQDGSPPSEYTWFKDGIVMPTNPKSTRAFSNSSYVLNPTTGELVFDPLSASDTGEYSCEARNGYGTPMTSNAVRMEAVERNVGVIVAAVLVTLILLGILVFGIWFAYSRGHFDRTKKGTSSKKVIYSQPSARSEGEFKQTSSFLV

SEQ ID NO: 2667 - protein, 557 aa, Homo sapiens
  MISC_FEATURE (392): Xaa equals any of the twenty naturally occurring L-amino acids
  MISC_FEATURE (419): Xaa equals any of the twenty naturally occurring L-amino acids
MPLDDLDREDEVRLLKYLFTLIRAGMTEEAQRLCKRCGQAWRAATLEGWKLYHDPNVNGGTELEPVEGNPYRRIWKISCWRMAEDELFNRYERAIYAALSGNLKQLLPVCDTWEDTVWAYFRVMVDSLVEQEIQTSVATLDETEELPREYLGANWTLEKVFEELQATDKKRVLEENQEHYHIVQKFLILGDIDGLMDEFSKWLSKSRNNLPGHLLRFMTHLILFFRTLGLQTKEEVSIEVLKTYIQLLIREKHTNLIAFYTCHLPQDLAVAQYALFLESVTEFEQRHHCLELAKEADLDVATITKTVVENIRKKDNGEFSHHDLAPALDTGTTEEDRLKIDVIDWLVFDPAQRAEALKQGNAIMRKFLASKKHEAAKEVFVKIPQDSIAEIXNQCEEQGMESPLPAEDDNAIREHLCIXAYLEAHETFNEWFKHMNSVPQKPALIPQPTFTEKVAHEHKEKKYEMDFGIWKGHLDALTADVKEKMYNVLLFVDGGWMVDVREDAKEDHERTHQMVLLRKLCLPMLCFLLHTILHSTGQYSGMPTVSQIWYPLSATNC

SEQ ID NO: 2668 - protein, 219 aa, Homo sapiens
MESNLSGLVPAAGLVPALPPAVTLGLTAAYTTLYALLFFSVYAQLWLVLLYGHKRLSYQTVFLALCLLWAALRTTLFSFYFRDTPRANRLGPLPFWLLYCCPVCLQFFTLTLMNLYFAQVVFKAKVKRRPEMSRGLLAVRGAFVGASLLFLLVNVLCAVLSHRRRAQPWALLLVRVLVSDSLFVICALSLAACLCLVARRAPSTSIYLEAKGTSVCQAA

SEQ ID NO: 2669 - protein, 185 aa, Homo sapiens
MTMITPSSNTTHYRESWYACRYRSGIPGSTHASDRNGHGLNVTFPPLLSGNDFQTVEEGSNVKLVCNVKANPQAQMMWYKNSSLLDLEKSRHQIQQTSESFQLSITKVEKPDNGTYSCIAKSSLKTESLDFHLIVKDKTVGVPIEPIIAACVVIFLTLCFGLIARRKKIMKLCMKDKDPHSETAL

SEQ ID NO: 2670 - protein, 232 aa, Homo sapiens
MLRAALPALLLPLLGLAAAAVADCPSSTWIQFQDSCYIFLQEAIKVESIEDVRNQCTDHGADMISIHNEEENAFILDTLKKQWKGPDDILLGMFYDTDDASFKWFDNSNMTFDKWTDQDDDEDLVDTCAFLHIKTGEWKKGNCEVSSVEGTLCKTAIPYKRKYLSDNHILISALVIASTVILTVLGAIIWFLYKKHSDSRFTTVFSTAPQSPYNEDCVLVVGEENEYPVQFD

SEQ ID NO: 2671 - protein, 139 aa, Homo sapiens
  MISC_FEATURE (21): Xaa equals any of the twenty naturally occurring L-amino acids
  MISC_FEATURE (59): Xaa equals any of the twenty naturally occurring L-amino acids
  MISC_FEATURE (72): Xaa equals any of the twenty naturally occurring L-amino acids
  MISC_FEATURE (87): Xaa equals any of the twenty naturally occurring L-amino acids
  MISC_FEATURE (94): Xaa equals any of the twenty naturally occurring L-amino acids
  MISC_FEATURE (120): Xaa equals any of the twenty naturally occurring L-amino acids
MANFKGHALPGSFFLIIGLCXSVKYPLKYFSHTRKNSPLHYYQRLEIVEAAIRTLFSVXGILAEQFVPDGPXLHLYHENHWIKLMNXQHSTMYXSLQSQELLTCSLSGQPRSLGGGQTGXGLWHIHGKVFCGNGWERKG

SEQ ID NO: 2672 - protein, 124 aa, Homo sapiens
  MISC_FEATURE (82): Xaa equals any of the twenty naturally occurring L-amino acids
  MISC_FEATURE (120): Xaa equals any of the twenty naturally occurring L-amino acids
  MISC_FEATURE (124): Xaa equals any of the twenty naturally occurring L-amino acids
MVKVTFNSALAQKEAKKDEPKSGEEALIIPPDAVAVDCKDPDDVVPVGQRRAWCWCMCFGLAFMLAGVILGGAYLYKYFALXPDDVYYCGIKYIKDDVILNEPSADAPAALYQTIEENIXIFEX

SEQ ID NO: 2673 - protein, 105 aa, Homo sapiens
  MISC_FEATURE (47): Xaa equals any of the twenty naturally occurring L-amino acids
  MISC_FEATURE (62): Xaa equals any of the twenty naturally occurring L-amino acids
  MISC_FEATURE (67): Xaa equals any of the twenty naturally occurring L-amino acids
  MISC_FEATURE (74): Xaa equals any of the twenty naturally occurring L-amino acids
  MISC_FEATURE (78): Xaa equals any of the twenty naturally occurring L-amino acids
  MISC_FEATURE (92): Xaa equals any of the twenty naturally occurring L-amino acids
  MISC_FEATURE (94): Xaa equals any of the twenty naturally occurring L-amino acids
  MISC_FEATURE (98): Xaa equals any of the twenty naturally occurring L-amino acids
MKLIYQGRLLQDPARTLRSLNITDNCVIHCHRSPPGSAVPGPSASLXPSATEPPSLVSMWGXLMVLXLWCCWVXSGTXEINYRQFFKATANXSXVGNXRLLKLPK

SEQ ID NO: 2674 - protein, 561 aa, Homo sapiens
  MISC_FEATURE (223): Xaa equals any of the twenty naturally occurring L-amino acids
  MISC_FEATURE (511): Xaa equals any of the twenty naturally occurring L-amino acids
  MISC_FEATURE (521): Xaa equals any of the twenty naturally occurring L-amino acids
  MISC_FEATURE (533): Xaa equals any of the twenty naturally occurring L-amino acids
  MISC_FEATURE (550): Xaa equals any of the twenty naturally occurring L-amino acids
MPLLLAYLKSVPLGHTHHLAKACYALENFVENLGPKVQPYLPELMECMLQLLRNPSSPRAKELAVSALGAIATAAQVSLLPYFPAIMEHLREFLLTGREDLQPVQIQSLETLGVLARAVGEPMRPLAEECCQLGLGLCDQVDDADLRRCTYSLFAALSGLMGEGLAPHLEQITTLMLLSLRSTEGIVPQYDGSSSFLLFDDESDGEEEEELMDEDVEEEDDSXISGYSVENAFFDEKEDTCAAVGEISVNTSVAFLPYMESVFEEVFKLLECPHLNVRKAAHEALGQFCCALHKACQSCPSEPNTAALQAALARVVPSYMQAVNRERERQVVMAVLEALTGVLRSCGTLTLKPPGRLAELCGVLKAVLQRKTACQDTDEEEEEEDDDQAEYDAMLLEHAGEAIPALAAAAGGDSFAPFFAGFLPLLVCKTKQGCTVAEKSFAVGTLAETIQGLGAASAQFVSRLLPVLLSTAQEADPEVRSNAIFGMGVLAEHGGHPAQEHFPKLLGLLFXLLARERHDRXRDNICGALARLXMASPPGNQSPKCWLPYXMPCTEEDLENG

SEQ ID NO: 2675 - protein, 453 aa, Homo sapiens
MGSVLGLCSMASWIPCLCGSAPCLLCRCCPSGNNSTVTRLIYALFLLVGVCVACVMLIPGMEEQLNKIPGFCENEKGVVPCNILVGYKAVYRLCFGLAMFYLLLSLLMIKVKSSSDPRAAVHNGFWFFKFAAAIAIIIGAFFIPEGTFTTVWFYVGMAGAFCFILIQLVLLIDFAHSWNESWVEKMEEGNSRCWYAALLSATALNYLLSLVAIVLFFVYYTHPASCSENKAFISVNMLLCVGASVMSILPKIQESQPRSGLLQSSVITVYTMYLTWSAMTNEPETNCNPSLLSIIGYNTTSTVPKEGQSVQWWHAQGIIGLILFLLCVFYSSIRTSNNSQVNKLTLTSDESTLIEDGGARSDGSLEDGDDVHRAVDNERDGVTYSYSFFHFMLFLASLYIMMTLTNWYRYEPSREMKSQWTAVWVKISSSWIGIVLYVWTLVAPLVLTNRDFD

SEQ ID NO: 2676 - protein, 170 aa, Homo sapiens
  MISC_FEATURE (11): Xaa equals any of the twenty naturally occurring L-amino acids
  MISC_FEATURE (75): Xaa equals any of the twenty naturally occurring L-amino acids
  MISC_FEATURE (111): Xaa equals any of the twenty naturally occurring L-amino acids
  MISC_FEATURE (125): Xaa equals any of the twenty naturally occurring L-amino acids
  MISC_FEATURE (168): Xaa equals any of the twenty naturally occurring L-amino acids
  MISC_FEATURE (170): Xaa equals any of the twenty naturally occurring L-amino acids
MCTHIHSHVCXGAHLPQRLQPRRASHIRGMNGRSVPPAVCSLPPEESSRDSDGGAGGAHAVCSRHPVRVKGLEGXEMESARENIDLQPGSSDPRSQPINLNHYATKKSVAXSMLDVALFMSNAMXLKAVLEQGPSSHYYTTLVTLISLSLLLQLVHRCLLVVIARLNXMX

SEQ ID NO: 2677 - protein, 530 aa, Homo sapiens
  MISC_FEATURE (2): Xaa equals any of the twenty naturally occurring L-amino acids
MXMITPSFNTTHYRESWYACRYRSGIPGSTHASASTTVPGLSEESTTFYSSPGSTETTAFSHSNTMSIHSQQSTPFPDSPGFTHTVLPATLTTTDIGQESTAFHSSSDATGTTPLPARSTASDLVGEPTTFYISPSPTYTTLFPASSSTSGLTEESTTFHTSPSFTSTIVSTESLETLAPGLCQEGQIWNGKQCVCPQGYVGYQCLSPLESFPVETPEKLNATLGMTVKVTYRNFTEKMNDASSQEYQNFSTLFKNRMDVVLKGDNLPQYRGVNIRRLLNGSIVVKNDVILEADYTLEYEELFENLAEIVKAKIMNETRTTLLDPDSCRKAILCYSEEDTFVDSSVTPGFDFQEQCTQKAAEGYTQFYYVDVLDGKLACVNKCTKGTKSQMNCNLGTCQLQRSGPRCLCPNTNTHWYWGETCEFNIAKSLVYGIVGAVMAVLLLALIILIILFSLSQRKRHREQYDVPQEWRKEGTPGIFQKTAIWEDQNLRESRFGLENAYNNFRPTLETVDSGTELHIQRPEMVASTV

SEQ ID NO: 2678 - protein, 204 aa, Homo sapiens
MVCGGFACSKNCLCALNLLYTLVSLLLIGIAAWGIGFGLISSLRVVGVVIAVGIFLFLIALVGLIGAVKHHQVLLFFYMIILLLVFIVQFSVSCACLALNQEQQGQLLEVGWNNTASARNDIQRNLNCCGFRSVNPNDTCLASCVKSDHSCSPCAPIIGEYAGEVLRFVGGIGLFFSFTEILGVWLTYRYRNQKDPRANPSAFL

SEQ ID NO: 2679 - protein, 543 aa, Homo sapiens [sequence omitted]

SEQ ID NO: 2680 - protein, 165 aa, Homo sapiens
  MISC_FEATURE (108): Xaa equals any of the twenty naturally occurring L-amino acids
MLKVGATLTGVGELVLDNNSVRLQPPKQGMQYYLSSQDFDSLLQRQESSVRLWKVLALVFGFATCATLFFILRKQYLQRQERLRLKQMQEEFQEHEAQLLSRAKPEDXESLKSACVVCLSSFKSCVFLECGHVCSCTECYRALPEPKKCPICRQAITRVIPLYNS

SEQ ID NO: 2681 - protein, 246 aa, Homo sapiens
MAAAAATKILLCLPLLLLLSGWSRAGRADPHSLCYDITVIPKFRPGPRWCAVQGQVDEKTFLHYDCGNKTVTPVSPLGKKLNVTTAWKAQNPVLREVVDILTEQLRDIQLENYTPKEPLTLQARMSCEQKAEGHSSGSWQFSFDGQIFLLFDSEKRMWTTVHPGARKMKEKWENDKVVAMSFHYFSMGDCIGWLEDFLMGMDSTLEPSAGAPLAMSSGTTQLRATATTLILCCLLIILPCFILPGI

SEQ ID NO: 2682 - protein, 408 aa, Homo sapiens
MGHMLYLLGNINKRTMHKYEQESKKAGKASFAYAWVLDETGEERERGVTMDVGMTKFETTTKVITLMDAPGHKDFIPNMITGAAQADVAVLVVDASRGEFEAGFETGGQTREHGLLVRSLGVTQLAVAVNKMDQVNWQQERFQEITGKLGHFLKQAGFKESDVGFIPTSGLSGENLITRSQSSELTKWYKGLCLLEQIDSFKPPQRSIDKPFRLCVSDVFKDQGSGFCITGKIEAGYIQTGDRLLAMPPNETCTVKGITLHDEPVDWAAAGDHVSLTLVGMDIIKINVGCIFCGPKVPIKACTRFRARILIFNIEIPITKGFPVLLHYQTVSEPAVIKRLISVLNKSTGEVTKKKPKFLTKGQNALVELQTQRPIALELYKDFKELGRFMLRYGGSTIAAGVVTEIKE

SEQ ID NO: 2683 - protein, 192 aa, Homo sapiens
MVRAGAVGAHLPASGLDIFGDLKKMNKRQLYYQVLNFAMIVSSALMIWKGLIVLTGSESPIVVVLSGSMEPAFHRGDLLFLTNFREDPIRAGEIVVFKVEGRDIPIVHRVIKVHEKDNGDIKFLTKGDNNEVDDRGLYKEGQNWLEKKDVVGRARGFLPYVGMVTIIMNDYPKFKYALLAVMGAYVLLKRES

SEQ ID NO: 2684 - protein, 459 aa, Homo sapiens
  MISC_FEATURE (433): Xaa equals any of the twenty naturally occurring L-amino acids
  MISC_FEATURE (434): Xaa equals any of the twenty naturally occurring L-amino acids
MYGIVYTRPCSGDANCIQPYLARRPKLQLSVYTTTRSHLGAENNIDLVLNVEDFDVESKFERTVNVSVPKKTRNNGTLYAYIFLHHAGVLPWHDGKQVHLVSPLTTYMVPKPEEINLLTGESDTQQIEAEKKPTSALDEPVSHWRPRLALNVMADNFVFDGSSLPADVHRYMKMIQLGKTVHYLPILFIDQLSNRVKDLMVINRSTTELPLTVSYDKVSLGRLRFWIHMQDAVYSLQQFGFSEKDADEVKGIFVDTNLYFLALTFFVAAFHLLFDFLAFKNDISFWKKKKSMIGMSTKAVLWRCFSTVVIFLFLLDEQTSLLVLVPAGVGAAIELWKVKKALKMTIFWRGLMPEFQFGTYSESERKTEEYDTQAMKYLSYLLYPLCVGGAVYSLLNIKYKSWYSWLINSFVNGVYAFGFLFMLPQLFVNYKVXXCVLPAAGPRLLCCPQLTWACLSCFS

SEQ ID NO: 2685 - protein, 159 aa, Homo sapiens
MGVLAEHGGHPAQEHFPKLLGLLFPLLARERHDRVRDNICGALARLLMASPTRKPEPQVLAALLHALPLKEDLEEWVTIGRLFSFLYQSSPDQVIDVAPELLRICSLILADNKIPPDTKAALLLLLTFLAKQHTDSFQAALGSLPVDKAQELQAVLGLS

SEQ ID NO: 2686 - protein, 257 aa, Homo sapiens
  MISC_FEATURE (103): Xaa equals any of the twenty naturally occurring L-amino acids
MEDLIRPWFPEFSEARAIMLSRGLAFGYGLLCLGMAYISSQMGPVLQAAISIFGMVGGPLLGLFCLGMFFPCANPPGAVVGLLAGLVMAFWIGIGSIVTSMGXSMPPSPSNGSSFSLPTNLTVATVTTLMPLTTFSKPTGLQRFYSLSYLWYSAHNSTTVIVVGLIVSLLTGRMRGRSLNPATIYPVLPKLLSLLPLSCQKRLHCRSYGQDHLDTGLFPEKPRNGVLGDSRDKEAMALDGTAYQGSSSTCILQETSL

SEQ ID NO: 2687 - protein, 267 aa, Homo sapiens
  MISC_FEATURE (53): Xaa equals any of the twenty naturally occurring L-amino acids
MVKISFQPAVAGIKGDKADKASASAPAPASATEILLTPAREEQPPQHRSKRGXSVGGVCYLSMGMVVLLMGLVFASVYIYRYFFLAQLARDNFFRCGVLYEDSLSSQVRTQMELEEDVKIYLDENYERINVPVPQFGGGDPADIIHDFQRGLTAYHDISLDKCYVIELNTTIVLPPRNFWELLMNVKRGTYLPQTYIIQEEMVVTEHVSDKEALGSFIYHLCNGKDTYRLRRRATRRRINKRGAKNCNAIRHFENTFVVETLICGVV

SEQ ID NO: 2688 - protein, 224 aa, Homo sapiens
  MISC_FEATURE (216): Xaa equals any of the twenty naturally occurring L-amino acids
MLTIWLAHVTFCTAYVAVVISSRLRELDRSIEEAAMDLGATPLKVFFVITLPMIMPAIISGWLLAFTLSLDDLVIASFVSGPGATTLPMLVFSSVRMGVNPEINALAIRWPARQQTPAWRFSNLATGSNRWRILKYSCASNLPPPVNAEMVADVRVLGAIGVVETTHPVNMAALQKFFVEQGVWIRPFGKLIYLMPPYIILPQQLQRLTAAVNRAXQDETFFCQ

SEQ ID NO: 2689 - protein, 109 aa, Homo sapiens
MSTSDLELLTSKMKYRFSSVVHNDVQAFFHLFTEFSNHLLCVEIGGFSGCFSEVNDLLQSLSKKFQLKSQKHKVQETTRRWIFSVFEILYFLLISFTHFNFTTANLLRY

SEQ ID NO: 2690 - protein, 424 aa, Homo sapiens
MEKQCCSHPVICSLSTMYTFLLGAIFIALSSSRILLVKYSANEENKYDYLPTTVNVCSELVKLVFCVLVSFCVIKKDHQSRNLKYASWKEFSDFMKWSIPAFLYFLDNLIVFYVLSYLQPAMAVIFSNFSIITTALLFRIVLKRRLNWIQWASLLTLFLSIVALTAGTKTLQHNLAGRGFHHDAFFSPSNSCLLFRSECPRKDNCTAKEWTFPEAKWNTTARVFSHIRLGMGHVLIIVQCFISSMANIYNEKILKEGNQLTESIFIQNSKLYFFGILFNGLTLGLQRSNRDQIKNCGFFYGHSAFSVALIFVTAFQGLSVAFILKFLDNMFHVLMAQVTTVIITTVSVLVFDFRPSLEFFLEAPSVLLSIFIYNASKPQVPEYAPRQERIRDLSGNLWERSSGDGEELERLTKPKSDESDEDTF

SEQ ID NO: 2691 - protein, 259 aa, Homo sapiens [sequence omitted]

SEQ ID NO: 2692 - protein, 311 aa, Homo sapiens
MTMITPSSNTTHYRESWYACRYRSGIPGSTHASAWLKRCRCRYCRCRENAEPSRAGWAAAARAATGTRFPSAAAAAMARLADYFIVVGYDHEKPGSGEGLGKIIQRFPQKDWDDTPFPQGIELFCQPGGWQLSRERKQPTFFVVVLTDIDSDRHYCSCLTFYEAEINLQGTKKEEIEGEAKVSGLIQPAEVFAPKSLVLVSRLYYPEIFRACLGLIYTVYVDSLNVSLESLIANLCACLVPAAGGSQKLFSLGAGDRQLIQTPLHDSLPITGTSVALLFQQLGTVAHACNLSTLGGRGGQLTRSGDRDHPG

SEQ ID NO: 2693 - protein, 220 aa, Homo sapiens
MTTMQGMEQAMPGAGPGVPQLGNMAVIHSHLWKGLQEKFLKGEPKVLGVVQILTALMSLSMGITMMCMASNTYGSNPISVYIGYTIWGSVMFIISGSLSIAAGIRTTKGLVRGSLGMNITSSVLAASGILINTFSLAFYSFHHPYCNYYGNSNNCHGTMSILMGLDGMVLLLSVLEFCIAVSLSAFGCKVLCCTPGGVVLILPSHSHMAETASPTPLNEV

SEQ ID NO: 2694 - protein, 183 aa, Homo sapiens
MASRAGPRAAGTDGSDFQHRERVAMHYQMSVTLKYEIKKLIYVHLVIWLLLVAKMSVGHLRLLSHDQVAMPYQWEYPYLLSILPSLLGLLSFPRNNISYLVLSMISMGLFSIAPLIYGSMEMFPAAQQLYRHGKAYRFLFGFSAVSIMYLVLVLAVQVHAWQLYYSKKLLDSWFTSTQEKKHK

SEQ ID NO: 2695 - protein, 137 aa, Homo sapiens
MGWLRPGPRPLCPPARASWAFSHRFPSPLAPRRSPTPFFMASLLCCGPKLAACGIVLSAWGVIMLIMLGIFFNVHSAVLIEDVPFTEKDFENGPQNIYNLYEQVSYNCFIAAGLYLLLGGFSFCQVRLNKRKEYMVR

SEQ ID NO: 2696 - protein, 140 aa, Homo sapiens
  MISC_FEATURE (125): Xaa equals any of the twenty naturally occurring L-amino acids
  MISC_FEATURE (134): Xaa equals any of the twenty naturally occurring L-amino acids
  MISC_FEATURE (137): Xaa equals any of the twenty naturally occurring L-amino acids
  MISC_FEATURE (139): Xaa equals any of the twenty naturally occurring L-amino acids
MCQKEEFPCSRNGVCYPRSDRCNYQNHCPNGSDEKNCFFCQPGNFHCKNNRCVFESWVCDSQDDCGDGSDEENCPVIVPTRVITAAVIGSLICGLLLVIALGCTCKLYSLRMFERRSFETQLSRXEAELVRREXLPXMXN

SEQ ID NO: 2697 - protein, 406 aa, Homo sapiens
  MISC_FEATURE (209): Xaa equals any of the twenty naturally occurring L-amino acids
MAENGKNCDQRRVAMNKEHHNGNFTDPSSVNEKKRREREERQNIVLWRQPLITLQYFSLEILVILKEWTSKLWHRQSIVVSFLLLLAVLIATYYVEGVHQQYVQRIEKQFLLYAYWIGLGILSSVGLGTGLHTFLLYLGPHIASVTLAAYECNSVNFPEPPYPDQIICPDEEGTEGTISLWSIISKVRIEACMWGIGTAIGELPPYFMXRAARLSGAEPDDEEYQEFEEMLEHAESAQDFASRAKLAVQKLVQKVGFFGILACASIPNPLFDLAGITCGHFLVPFWTFFGATLIGKAIIKMHIQKIFVIITFSKHIVEQMVAFIGAVPGIGPSLQKPFQEYLEAQRQKLHHKSEMGTPQGENWLSWMFEKLVVVMVCYFILSIINSMAQSYAKRIQQRLNSEEKTK

SEQ ID NO: 2698 - protein, 181 aa, Homo sapiens
MAPTLATAHRRRWWMACTAVLENLLFSAVLLGWGSLLIMLKSEGFYSYLCTEPENVTNGTVGGTAEPGHEEVSWMNGWLSCQAQDEMLNLAFTVGSFLLSAITLPLGIVMDKYGPRKLRLLGSACFAVSCLLIAYGASKPNALSVLIFIALALNGFGGMCMTFTSLTLPNMFGDLRSTFIA

SEQ ID NO: 2699 - protein, 342 aa, Homo sapiens
  MISC_FEATURE (183): Xaa equals any of the twenty naturally occurring L-amino acids
  MISC_FEATURE (221): Xaa equals any of the twenty naturally occurring L-amino acids
MGSWSAAGVADQSVTVLTGIKNAVGENGKVLYAKGANVTSDKGIIDFLNQYEEAVKVDPRSPQEMIDEAVQTAKQSDVVVAVVGEAQGMAHEASSRTDITIPQSQRDLIAALKATGKPLVLVLMNGRPLALVKEDQQADAILETWFAGTEGGNAIADVLFGDYNPSGKLPMSFPRSVGQIPVXYSHLNTGRPYNADKPNKYTSRYFDEANGALYPFGYGLXYTTFTVSDVKLSAPTMKRDGKVTASVQVTNTGKREGATVVQMYLQDVTASMSRPVKQLKGFEKITLKPGETQTVSFPIDIEALKFWNQQMKYDAEPGKFNVFIGTDSARVKKGEFEVAVML

SEQ ID NO: 2700 - protein, 248 aa, Homo sapiens
MAPKAAKGAKPEPAPAPPPPGAKPEEDKKDGKEPSDKPQKAVQDHKEPSDKPQKAVQPKHEVGTRRGCRRYRWELKDSNKEFWLLGHAEIKIRSLGCLIAAMILLSSLTVHPILRLIITMEISFFSFFILLYSFAIHRYIPFILWPISDLFNDLIACAFLVGAVVFAVRSRRSMNLHYLLAVILIGAAGVFAFIDVCLQRNHFRGKKAKKHMLVPPPGKEKGPQQGKGPEPAKPPEPGKPPGPAKGKK

SEQ ID NO: 2701 - protein, 285 aa, Homo sapiens
MDDSTEREQSRLTSCLKKREEMKLKECVSILPRKESPSVRSSKDGKLLAATLLLALLSCCLTVVSFYQVAALQGDLASLRAELQGHHAEKLPAGAGAPKAGLEEAPAVTAGLKIFEPPAPGEGNSSQNSRNKRAVQGPEETVTQDCLQLIADSETPTIQKGSYTFVPWLLSFKRGSALEEKENKILVKETGYFFIYGQVLYTDKTYAMGHLIQRKKVHVFGDELSLVTLFRCIQNMPETLPNNSCYSAGIAKLEEGDELQLAIPRENAQISLDGDVTFFGALKLL

SEQ ID NO: 2702 - protein, 212 aa, Homo sapiens
  MISC_FEATURE (170): Xaa equals any of the twenty naturally occurring L-amino acids
  MISC_FEATURE (172): Xaa equals any of the twenty naturally occurring L-amino acids
  MISC_FEATURE (177): Xaa equals any of the twenty naturally occurring L-amino acids
  MISC_FEATURE (196): Xaa equals any of the twenty naturally occurring L-amino acids
  MISC_FEATURE (212): Xaa equals any of the twenty naturally occurring L-amino acids
MDALKPPCLWRNHERGKKDRDSCGRKNSEPGSPHSLEALRDAAPSQGLNFLLLFTKMLFIFNFLFSPLPTPALICILTFGAAIFLWLITRPQPVLPLLDLNNQSVGIEGGARKGVSQKNNDLTSCCFSDAKTMYEVFQRGLAVSDNGPCLGYRKPNQPYRWLSYKQVSDXAXYLGSXLLHKGYNHHQTSLSASLLXIGQSGSSPNWLVTTLX

SEQ ID NO: 2703 - protein, 310 aa, Homo sapiens
MVYKTLFALCILTAGWRVQSLPTSAPLSVSLPTNIVPPTTIWTSSPQNTDADTASPSNGTHNNSVLPVTASAPTSLLPKNISIESREEEITSPGSNWEGTNTDPSPSGFSSTSGGVHLTTTLEEHSSGTPEAGVAATLSQSAAEPPTLISPQAPASSPSSLSTSPPEVFSASVTTNHSSTVTSTQPTGAPTAPESPTEESSSDHTPTSHATAEPVPQEKTPPTTVSGKVMCELIDMETTTTFPRVIMQEVEHALSSGSIAAITVTVIAVVLLVFGVAAYLKIRHSSYGRLLDDHDYGSWGNYNNPLYDDS

SEQ ID NO: 2704 - protein, 141 aa, Homo sapiens
  MISC_FEATURE (131): Xaa equals any of the twenty naturally occurring L-amino acids
  MISC_FEATURE (133): Xaa equals any of the twenty naturally occurring L-amino acids
MKLLSLVAVVGCLLVPPAEANKSSEDIRCKCICPPYRNISGHIYNQNVSQKDCNCLHVVEPMPVPGHDVEAYCLLCECRYEERSTTTIKVIIVIYLSVVGALLLYMAFLMLVDPLIRKPDAYTEQLHNEEXNXDARSMASS

SEQ ID NO: 2705 - protein, 567 aa, Homo sapiens
MLVTSKMAAPEAPATSAQSQTGSPAQEAATEGPSSACAFSQAPCAREVDANRPSTAFLGQNDVFDFTQPAGVSGMAFPRPKRPAPAQEAATEGPSAASGVPQTGPGREVAATRPKTTKSGKALAKTRWVEPQNVVAAAAAKAKMATSIPEPEGAAAATAQHSAEPWARMGGKRTKKSKHLDDEYESSEEERETPAVPPTWRASQPSLTVRAQLAPRPPMAPRSQIPSRHVLCLPPRNVTLLQERANKLVKYLMIKDYKKIPIKRADMLKDVIREYDEHFPEIIERATYTLEKKFGIHLKEIDKEEHLYILVCTRDSSARLLGKTKDTPRLSLLLVILGVIFMNGNRASEAVLWEALRKMGLRPGVRHPFLGDLRKLITDDFVKQKYLEYKKIPNSNPPEYEFLWGLRARHETSKMRVLRFIAQNQNRDPREWKAHFLEAVDDAFKTMDVDMAEEHARAQMRAQMNIGDEALIGRWSWDDIQVELLTWDEDGDFGDAWARIPFAFWARYHQYILNSNRANRRATWRAGVSSGTNGGASTSVLDGPSTSSTIRTRNAARAGASFFSWIQ

SEQ ID NO: 2706 - protein, 374 aa, Homo sapiens
MVLWESPRQCSSWTLCEGFCWLLLLPVMLLIVARPVKLAAFPTSLSDCQTPTGWNCSGYDDRENDLFLCDTNTCKFDGECLRIGDTVTCVCQFKCNNDYVPVCGSNGESYQNECYLRQAACKQQSEILVVSEGSCATDAGSGSGDGVHEGSGETSQKETSTCDICQFGAECDEDAEDVWCVCNIDCSQTNFNPLCASDGKSYDNACQIKEASCQKQEKIEVMSLGRCQDNTTTTTKSEDGHYARTDYAENANKLEESAREHHIPCPEHYNGFCMHGKCEHSINMQEPSCRCDAGYTGQHCEKKDYSVLYVVPGPVRFQYVLIAAVIGTIQIAVICVVVLCITRKCPRSNRIHRQKQNTGHYSSDNTTRASTRLI

SEQ ID NO: 2707 - protein, 128 aa, Homo sapiens
  MISC_FEATURE (124): Xaa equals any of the twenty naturally occurring L-amino acids
MSICWVRSPVVHSVLVMGYGGLTSLFNLVVLAWALWTLRRLRERADAPSVRACHDTVTVLGLTVLLGTTWALAFFSFGVFLLPQLFLFTILNSLYGFFLFLWFCSQRCRSEAEAKAQIEAFSSXQTTQ

SEQ ID NO: 2708 - protein, 465 aa, Homo sapiens
  MISC_FEATURE (104): Xaa equals any of the twenty naturally occurring L-amino acids
  MISC_FEATURE (106): Xaa equals any of the twenty naturally occurring L-amino acids
  MISC_FEATURE (110): Xaa equals any of the twenty naturally occurring L-amino acids
  MISC_FEATURE (220): Xaa equals any of the twenty naturally occurring L-amino acids
MEEEDEEARALLAGGPDEADRGAPAAPGALPALCDPSRLAHRLLVLLLMCFLGFGSYFCYDNPAALQTQVKRDMQVNTTKFMLLYAWYSWPNVVLCFFGGFLIXRXFGIXWGTIIFSCFVCIGQVVFALGGIFNAFWLMEFGRFVFGIGGESLAVAQNTYAVSWFKGKELNLVFGLQLSMARIGSTVNMNLMGWLYSKIEALLGSAGHTTLGITLMIGGXTCILSLICALALAYLDQRAERILHKEQGKTGEVIKLTDVKDFSLPLWLIFIICVCYYVAVFPFIGLGKVFFTEKFGFSSQAASAINSVVYVISAPMSPVFGLLVDKTGKNIIWVLCAVAATLVSHMMLAFTMWNPWIAMCLLGLSYSLLACALWPMVAFVVPEHQLGTAYGFMQSIQNLGLAIISIIAGMILDSRGYLFLEVFFIACVSLSLLSVVLLYLVNRAQGGNLNYSARQREEIKFSHTE

SEQ ID NO: 2709 - protein, 372 aa, Homo sapiens
MSNNNLSNLPQGIFDDLDNITQLILRNNPWYCGCKMKWVRDWLQSLPVKVNVRGLMCQAPEKVRGMAIKDLNAELFDCKDSGIVSTIQITTAIPNTVYPAQGQWPAPVTKQPDIKNPKLTKDQQTTGSPSRKTITITVKSVTSDTIHISWKLALPMTALRLSWLKLGHSPAFGSITETIVTGERSEYLVTALEPDSPYKVCMVPMETSNLYLFDETPVCIETETAPLRMYNPTTTLNREQEKEPYKNPNLPLAAIIGGAVALVTIALLALVCWYVHRNGSLFSRNCAYSKGRRRKDDYAEAGTKKDNSILEIRETSFQMLPISNEPISKEEFVIHTIFPPNGMNLYKNNHSESSSNRSYRDSGIPDSDHSHS

SEQ ID NO: 2710 - protein, 530 aa, Homo sapiens
MAKGEGAESGSAAGLLPTSILQSTERPAQVKKEPKKKKQQLSVCNKLCYALGGAPYQVTGCALGFFLQIYLLDVAQVGPFSASIILFVGRAWDAITDPLVGLCISKSPWTCLGRLMPWIIFSTPLAVIAYFLIWFVPDFPHGQTYWYLLFYCLFETMVTCFHVPYSALTMFISTEQTERDSATAYRMTVEVLGTVLGTAIQGQIVGQADTPCFQDLNSSTVASQSANHTHGTTSHRETQKAYLLAAGVIVCIYIICAVILILGVREQREPYEAQQSEPIAYFRGLRLVMSHGPYIKLITGFLFTSLAFMLVEGNFVLFCTYTLGFRNEFQNLLLAIMLSATLTIPIWQWFLTRFGKKTAVYVGISSAVPFLILVALMESNLIITYAVAVAAGISVAAAFLLPWSMLPDVIDDFHLKQPHFHGTEPIFFSFYVFFTKFASGVSLGISTLSLDFAGYQTRGCSQPERVKFTLNMLVTMAPIVLILLGLLLFKMYPIDEERRRQNKKALQALRDEASSSGCSETDSTELASIL

SEQ ID NO: 2711 - protein, 296 aa, Homo sapiens
  MISC_FEATURE (216): Xaa equals any of the twenty naturally occurring L-amino acids
  MISC_FEATURE (248): Xaa equals any of the twenty naturally occurring L-amino acids
  MISC_FEATURE (265): Xaa equals any of the twenty naturally occurring L-amino acids
MAGILAWFWNERFWLPHNVTWADLKNTEEATFPQAEDLYLAFPLAFCIFMVRLIFERFVAKPCAIALNIQANGPQIAPPNAILEKVFTAITKHPDEKRLEGLSKQLDWDVRSIQRWFRQRRNQEKPSTLTRFCESMWRFSFYLYVFTYGVRFLKKTPWLWNTRHCWYNYPYQPLTTDLHYYYILELSFYWSLMFSQFTDIKRKDFGIMFLHHLVSXFLITFSYVNNMARVGTLVLCLHDSADALLEAXKMANYAKFQKMCDLLFXMFAVVFITTRLGIFPLWPLLWCPDGKCSVGL

SEQ ID NO: 2712 - protein, 223 aa, Homo sapiens
MTWRHHVRLLFTVSLALQIINLGNSYQREKHNGGREEVTKVATQKHRQSPLNWTSSHFGEVTGSAEGWGPEEPLPYSRAFGEGASARPRCCRNGGTCVLGSFCVCPAHFTGRYCEHDQRRSECGALEHGAWTLRACHLCRCIFGALHCLPLQTPDRCDPKDFLASHAHGPSAGGAPSLLLLLPCALLHRLLRPDAPAHPRSLVPSVLQRERRPCGRPGLGHRL

SEQ ID NO: 2713 - protein, 206 aa, Homo sapiens
MLLQSQTMGVSHSFTPKGITIPQREKPGHMYQNEDYLQNGLPTETTVLGTVQILCCLLISSLGAILVFAPYPSHFNPAISTTLMSGYPFLGALCFGITGSLSIISGKQSTKPFDLSSLTSNAVSSVTAGAGLFLLADSMVALRTASQHCGSEMDYLSSLPYSEYYYPIYEIKDCLLTSVSLTSSFSSTQSQDHIQQVKKSSSRSWI

SEQ ID NO: 2714 - protein, 266 aa, Homo sapiens
MWWFQQGLSFLPSALVIWTSAAFIFSYITAVTLHHIDPALPYISDTGTVAPEKCLFGAMLNIAAVLCIATIYVRYKQVHALSPEENVIIKLNKAGLVLGILSCLGLSIVANFQKTTLFAAHVSGAVLTFGMGSLYMFVQTILSYQMQPKIHGKQVFWIRLLLVIWCGVSALSMLTCSSVLHSGNFGTDLEQKLHWNPEDKGYVLHMITTAAEWSMSFSFFGFFLTYIRDFQKISLRVEANLHGLTLYDTAPCPINNERTRLLSRDI

SEQ ID NO: 2715 - protein, 219 aa, Homo sapiens
  MISC_FEATURE (177): Xaa equals any of the twenty naturally occurring L-amino acids
  MISC_FEATURE (191): Xaa equals any of the twenty naturally occurring L-amino acids
  MISC_FEATURE (192): Xaa equals any of the twenty naturally occurring L-amino acids
  MISC_FEATURE (195): Xaa equals any of the twenty naturally occurring L-amino acids
  MISC_FEATURE (198): Xaa equals any of the twenty naturally occurring L-amino acids
  MISC_FEATURE (210): Xaa equals any of the twenty naturally occurring L-amino acids
MPGSASKRRIPVSQPGMADPHQLFDDTSSAQSRGYGAQRAPGGLSYPAASPTPHAAFLADPVSNMAMAYGSSLAAQGKELVDKNIDRFIPITKLKYYFAVDTMYVGRKLGLLFFPYLHQDWEVQYQQDTPVAPRFDVNAPDLYIPAMAFITYVLVAGLALGTQDRFSPDLLGLQASXALAWLTLEVLAILXXLYXGSXGKNRNFTTIRTXGGPFLGLTK

SEQ ID NO: 2716 - protein, 285 aa, Homo sapiens
  MISC_FEATURE (250): Xaa equals any of the twenty naturally occurring L-amino acids
MSAAVRTEPLRGEPPLLVRGDPYSVVVLLQGYAEPEGVDDAVRADGSVTLVLPQAWGSATSLQESPPHSGGAKTALEEAARGPILVDTGGPWAREALLGALAGQGMAPGDVTLVVGTHGHSDHIGNLGLFPGAALLVSHDFCLPGGRYLPHGLGEERPLQLGPGLEVWATPGHGGQRDVSVVVAGTALGTVVVAGDVFERSGDEDSWQALSEDPVAQERSRKRVLDTADVVVPGHGAPFRGSEKPLSHGXDVQKTRGQCDRFQPPCKRPVFQRGQSSLSLVLQPN

SEQ ID NO: 2717 - protein, 248 aa, Homo sapiens
  MISC_FEATURE (185): Xaa equals any of the twenty naturally occurring L-amino acids
MTSQPVPNETIIVLPSNVINFSQAEKPEPTNQGQDSLKKHLHAEIKVIGTIQILCGMMVLSLGIILASASFSPNFTQVTSTLLNSAYPFIGPFFFIISGSLSIATEKRLTKLLVHSSLVGSILSALSALVGFIILSVKQATLNPASLQCELDKNNIPTRSYVSYFYHDSLYTTDCYTAKASLAGXLSLMLICTLLEFCLAVLTAVLRWKQAYSDFPGSVLFLPHSYIGNSGMSSKMTHDCGYEELLTS

SEQ ID NO: 2718 - protein, 323 aa, Homo sapiens
MDKSDLGQKRTSGAVCHQDPRTCEEPASSGAHIWPDDITKWPICTEQARSNHTGFLHVDCEIKGRPCCIGTKGSCEITTREYCEFMHGYFHEEATLCSQVHCLDKVCGLLPFLNPEVPDQFYRLWLSLFLHAGVVHCLVSVVFQMTILRDLEKLAGWHRIAIIFILSGITGNLASAIFLPYRAEVGPAGSQFGLLACLFVELFQSWPLLERPWKAFLNLSAIVLFLFICGLLPWIDNIAHIFGFLSGLLLAFAFLPYITFGTSDKYRKRALILVSLLAFAGLFAALVLWLYIYPINWPWIEHLTCFPFTSRFCEKYELDQVLH

SEQ ID NO: 2719 - protein, 147 aa, Homo sapiens
MANTTGEPEEVSGALSPPSASAYVKLVLLGLIMCVSLAGNAILSLLVLKERALHKAPYYFLLDLCLADGIRSAVCFPFVLASVRHGSSWTFSALSCKIVAFMAVLFCFHAAFMLFCISVTRYMAIAHHRFYAKRMTLWTCAAVICMA

SEQ ID NO: 2720 - protein, 342 aa, Homo sapiens [sequence omitted]

SEQ ID NO: 2721 - protein, 234 aa, Homo sapiens
MRKTRLWGLLWMLFVSELRAATKLTEEKYELKEGQTLDVKCDYTLEKFASSQKAWQIIRDGEMPKTLACTERPSKNSHPVQVGRIILEDYHDHGLLRVRMVNLQVEDSGLYQCVIYQPPKEPHMLFDRIRLVVTKGFSGTPGSNENSTQNVYKIPPTTTKALCPLYTSPRTVTQAPPKSTADVSTPDSEINLTNVTDIIRVPVFNIVILLAGGFLSKSLVFSVLFAVTLRSFVP

SEQ ID NO: 2722 - protein, 713 aa, Homo sapiens
MLLATLLLLLLGGALAHPDRIIFPNHACEDPPAVLLEVQGTLQRPLVRDSRTSPANCTWLILGSKEQTVTIRFQKLHLACGSERLTLRSPLQPLISLCEAPPSPLQLPGGNVTITYSYAGARAPMGQGFLLSYSQDWLMCLQEEFQCLNHRCVSAVQRCDGVDACGDGSDEAGCSSDPFPGLTPRPVPSLPCNVTLEDFYGVFSSPGYTHLASVSHPQSCHWLLDPHDGRRLAVRFTALDLGFGDAVHVYDGPGPPESSRLLRSLTHFSNGKAVTVETLSGQAVVSYHTVAWSNGRGFNATYHVRGYCLPWDRPCGLGSGLGAGEGLGERCYSEAQRCDGSWDCADGTDEEDCPGCPPGHFPCGAAGTSGATACYLPADRCNYQTFCADGADERRCRHCQPGNFRCRDEKCVYETWVCDGQPDCADGSDEWDCSYVLPRKVITAAVIGSLVCGLLLVIALGCTCKLYAIRTQEYSIFAPLSRMEAEIVQQQAPPSYGQLIAQGAIPPVEDFPTENPNDNSVLGNLRSLLQILRQDMTPGGGPGARRRQRGRLMRRLVRRLRRWGLLPRTNTPARASEARSQVTPSAAPLEALDGGTGPAREGGAVGGQDGEQAPPLPIKAPLPSASTSPAPTTVPEAPGPLPSLPLEPSLLSGVVQALRGRLLPSLGPPGPTRSPPGPHTAVLALEDEDDVLLVPLAEPGVWVAEAEDEPLLT

SEQ ID NO: 2723 - protein, 941 aa, Homo sapiens [sequence omitted]

SEQ ID NO: 2724 - protein, 377 aa, Homo sapiens
  MISC_FEATURE (66): Xaa equals any of the twenty naturally occurring L-amino acids
MRGQRSLLLGPARLCLRLLLLLGYRRRCPPLLRGLVQRWRYGKVCLRSLLYNSFGGSDTAVDAAFXPVYWLVDNVIRWFGVVFVVLVIVLTGSIVAIAYLCVLPLILRTYSVPRLCWHFFYSHWNLILIVFHYYQAITTPPGYPPQGRNDIATVSICKKCIYPKPARTHHCSICNRCVLKMDHHCPWLNNCVGHYNHRYFFSFCFFMTLGCVYCSYGSWDLFREAYAAIEKMKQLDKNKLQAVANQTYHQTPPPTFSFRERMTHKSLVYLWFLCSSVALALGALTVWHAVLISRGETSIERHINKKERRRLQAKGRVFRNPYNYGCLDNWKVFLGVDTGRHWLTRVLLPSSHLPHGNGMSWEPPPWVTAHSASVMAV

SEQ ID NO: 2725 - protein, 1082 aa, Homo sapiens
MGDGELCQEINSCLIHHGGCHIHAECISTGPQQVSCSCREGYSGDGIRTCELLDPCSKNNGGCSPYATCKSTGDGQRTCTCDTAHTVGDGLTCRARVGLELLRDKHASFFSLRLLEYKELKGDGPFTIFVPHADLMSNLSQDELARIRAHRQLVFRYHVVGCRRLRSEDLLEQGYATALSGHPLRFSEREGSIYLNDFARVVSSDHEAVNGILHFIDRVLLPPEALHWEPDDAPIPRRNVTAAAQGFGYKIFSGLLKVAGLLPLLREASHRPFTMLWPTDAAFRALPPDRQAWLYHEDHRDKLAAILRGHMIRNVEALASDLPNLGPLRTMHGTPISFSCSRTRPGELMVGEDDARIVQRHLPFEGGLAYGIDQLLEPPGLGARCDHFETRPLRLNTCSICGLEPPCPEGSQEQGSPEACWRFYPKFWTSPPLHSLGLRSVWVHPSLWGRPQGLGRGCHRNCVTTTWKPSCCPGHYGSECQACPGGPSSPCSDRGVCMDGMSGSGQCLCRSGFAGTACELCAPGAFGPHCQACRCTVHGRCDEGLGGSGSCFCDEGWTGPRCEVQLELQPVCTPPCAPEAVCRAGNSCECSLGYEGDGRVCTVADLCQDGHGGCSEHANCSQVGTMVTCTCLPDYEGDGWSCRARNPCTDGHRGGCSEHANCLSTGLNTRRCECHAGYVGDGLQCLEESEPPVDRCLGQPPPCHSDAMCTDLHFQEKRAGVFHLQATSGPYGLNFSEAEAACEAQGAVLASFPQLSAAQQLGFHLCLMGWLANGSTAHPVVFPVADCGNGRVGIVSLGARKNLSERWDAYCFRVQDVACRCRNGFVGDGISTCNGKLLDVLAATANFSTFYGMLLGYANATQRGLDFLDFLDDELTYKTLFVPVNEGFVDNMTLSGPDLELHASNATLLSANASQGKLLPAHSGLSLIISDAGPDNSSWAPVAPGTVVVSRIIVWDIMAFNGIIHALASPLLAPPQPQAVLAPEAPPVAAGVGAVLAAGALLGLVAGALYLRARGKPMGFGFSAFQAEDDADDDFSPWQEGTNPTLVSVPNPVFGSDTFCEPFDDSLLEEDFPDTQRILTVK

SEQ ID NO: 2726 - protein, 112 aa, Homo sapiens
  MISC_FEATURE (71): Xaa equals any of the twenty naturally occurring L-amino acids
MLFFTTVLSIDIRRMELADLNKRLPPEACLPSAKPVGQPTRYERQLAVRPSTPHTITLQPSSFRNLRLPKXLRVVYFLARTRLAQRLIMAGTVVWIGILVYTDPAGLRNYLA

SEQ ID NO: 2727 - protein, 693 aa, Homo sapiens
  MISC_FEATURE (680): Xaa equals any of the twenty naturally occurring L-amino acids
  MISC_FEATURE (681): Xaa equals any of the twenty naturally occurring L-amino acids
  MISC_FEATURE (682): Xaa equals any of the twenty naturally occurring L-amino acids
  MISC_FEATURE (683): Xaa equals any of the twenty naturally occurring L-amino acids
MKDWLGGSEVNPLWTALLFLLCHSGSTSGSHNLGAQQTSARSASLSSAATTGLTTQQRTAIENATVAFFLQCISCHPNNQKLMAQVLCELFQTSPQRGNLPTSGNISGFIRRLFLQLMLEDEKVTMFLQSPCPLYKGRINATSHVIQHPMYGAGHKFRTLHLPVSTTLSDVLDRVSDTPSITAKLISEQKDDKEKKNHEEKEKVKAENGFQDNYSVVVASGLKSQSKRAVSATPPRPPSRRGRTIPDKIGSTSGAEAANKIITVPVFHLFHKLLAGQPLPAEMTLAQLLTLLYDRKLPQGYRSIDLTVKLGSRVITDPSLSKTDSYKRLHPEKDHGDLLASCPEDEALTPGDECMDGILDESLLETCPIQSPLQVFAGMGGLALIAERLPMLYPEVIQQVSAPVVTSTTQEKPKDSDQFEWVTIEQSGELVYEAPETVAAEPPPIKSAVQTMSPIPAHSLAAFGLFLRLPGYAEVLLKERKHAQCLLRLVLGVTDDGEGSHILQSPSANVLPTLPFHVLRSLFSTTPLTTDDGVLLRRMALEIGALHLILVCLSALSHHSPRVPNSSVNQTEPQVSSSHNPTSTEEQQLYWAKGTGFGTGSTASGWDVEQALTKQRLEEEHVTCLLQVLASYINPVSSAVNGEAQSSHETRGQNSNALPSVLLELLSQSCLIPAMSSYLXXXXDLKGKMLKQE

SEQ ID NO: 2728 - protein, 117 aa, Homo sapiens
  MISC_FEATURE (117): Xaa equals any of the twenty naturally occurring L-amino acids
MGVLCRSLAGLGGLSLLGVFCGGYLMALAVLSPCPPLVGTSAGVVLVVLSWVLCLGVFSYVKVAASSLLHGGGRPALLAAGVAIQVGSLLGAVAMFPPTSIYHVFHSRKDCADPCDX

SEQ ID NO: 2729 - protein, 477 aa, Homo sapiens [sequence omitted]

SEQ ID NO: 2730 - protein, 327 aa, Homo sapiens
MAELPGPFLCGALLGFLCLSGLAVEVKVPTEPLSTPLGKTAELTCTYSTSVGDSFALEWSFVQPGKPISESHPILYFTNGHLYPTGSKSKRVSLLQNPPTVGVATLKLTDVHPSDTGTYLCQVNNPPDFYTNGLGLINLTVLVPPSNPLCSQSGQTSVGGSTALRCSSSEGAPKPVYNWVRLGTFPTPSPGSMVQDEVSGQLILTNLSLTSSGTYRCVATNQMGSASCELTLSVTEPSQGRVAGALIGVLLGVLLLSVAAFCLVRFQKERGKKPKETYGGSDLREDAIAPGISEHTCMRADSSKGFLERPSSASTVTTTKSKLPMVV

SEQ ID NO: 2731 - protein, 337 aa, Homo sapiens
  MISC_FEATURE (128): Xaa equals any of the twenty naturally occurring L-amino acids
  MISC_FEATURE (174): Xaa equals any of the twenty naturally occurring L-amino acids
  MISC_FEATURE (187): Xaa equals any of the twenty naturally occurring L-amino acids
  MISC_FEATURE (258): Xaa equals any of the twenty naturally occurring L-amino acids
MDQNEHSHWGPHAKGQCASRSELRIILVGKTGTGKSAAGNSILRKQAFESKLGSQTLTKTCSKSQGSWGNREIVIIDTPDMFSWKDHCEALYKEVQRCYLLSAPGPHVLLLVTQLGRYTSQDQQAAQXVKEIFGKDAMGHTIVLFTHKEDLNGGSLMDYMHDSDNKALSKLVAXCGGRICAFNNRAXGSNQDDQVKELMDCIEDLLMEKNGDHYTNGLYSLIQRSKCGPVGSDERVKEFKQSLIKYMETQRSYTALAXANCLKGALIKTQLCVLFCIQLFLRLIILWLCILHSMCNLFCCLLFSMCNLFCSLLFIIPKKLMIFLRTVIRLERKTPRL

SEQ ID NO: 2732 - protein, 122 aa, Homo sapiens
MEGQDEVSAREQHFHSQVRESTICFLLFAILYVVSYFIITRYKRKSDEQEDEDAIVNRISLFLSTFTLAVSAGAVLLLPFSIISNEILLSFPQNYYIQWLNGSLIHGLWNLASFFPTFGYLY

SEQ ID NO: 2733 - protein, 178 aa, Homo sapiens [sequence omitted]

SEQ ID NO: 2734 - protein, 691 aa, Homo sapiens
MKRLPLLVVFSTLLNCSYTQNCTKTPCLPNAKCEIRNGIEACYCNMGFSGNGVTICEDDNECGNLTQSCGENANCTNTEGSYYCMCVPGFRSSSNQDRFITNDGTVCIENVNANCHLDNVCIAANINKTLTKIRSIKEPVALLQEVYRNSVTDLSPTDIITYIEILAESSSLLGYKNNTISAKDTLSNSTLTEFVKTVNNFVQRDTFVVWDKLSVNHRRTHLTKLMHTVEQATLRISQSFQKTTEFDTNSTDIALKVFFFDSYNMKHIHPHMNMDGDYINIFPKRKAAYDSNGNVAVAFLYYKSIGPLLSSSDNFLLKPQNYDNSEEEERVISSVISVSMSSNPPTLYELEKITFTLSHRKVTDRYRSLCAFWNYSPDTMNGSWSSEGCELTYSNETHTSCRCNHLTHFAILMSSGPSIGIKDYNILTRITQLGIIISLICLAICIFTFWFFSEIQSTRTTIHKNLCCSLFLAELVFLVGINTNTNKLFCSIIAGLLHYFFLAAFAWMCIEGIHLYLIVVGVIYNKGFLHKNFYIFGYLSPAVVVGFSAALGYRYYGTTKVCWLSTENNFIWSFIGPACLIILVNLLAFGVIIYKVFRHTAGLKPEVSCFENIRSCARGALALLFLLGTTWIFGVLHVVHASVVTAYLFTVSNAFQGMFIFLFLCVLSRKIQEEYYRLFKNVPCCFGCLSC

SEQ ID NO: 2735 - protein, 116 aa, Homo sapiens
  MISC_FEATURE (5): Xaa equals any of the twenty naturally occurring L-amino acids
  MISC_FEATURE (56): Xaa equals any of the twenty naturally occurring L-amino acids
MEFLXPGSRKRKDYISDHKECLAYGEIFQNEGGYYLCGHGKTFAMAVCLSGHLLMXLDQIYVDADIWDTCLGFGAVAQNCVSLYVTVLPLFILSKVSLYICFTICERVYHNTEVFS

SEQ ID NO: 2736 - protein, 362 aa, Homo sapiens
MPFAYFFTESEGFAGSRKGVLGRVYETVVMLMLLTLLVLGMVWVASAIVDKNKANRESLYDFWEYYLPYLYSCISFLGVLLLLVCTPLGLARMFSVTGKLLVKPRLLEDLEEQLYCSAFEEAALTRRICNPTSCWLPLDMELLHRQVLALQTQRVLLEKRRKASAWQRNLGYPLAMLCLLVLTGLSVLIVAIHILELLIDEAAMPRGMQGTSLGQVSFSKLGSFGAVIQVVLIFYLMVSSVVGFYSSPLFRSLRPRWHDTAMTQIIGNCVCLLVLSSALPVFSRTLGLTRFDLLGDFGRFNWLGNFYIVFLYNAAFAGLTTLCLVKTFTAAVRAELIRAFGLDRLPLPVSGFPQASRKTQHQ

SEQ ID NO: 2737 - protein, 321 aa, Homo sapiens
  MISC_FEATURE (142): Xaa equals any of the twenty naturally occurring L-amino acids
  MISC_FEATURE (301): Xaa equals any of the twenty naturally occurring L-amino acids
  MISC_FEATURE (302): Xaa equals any of the twenty naturally occurring L-amino acids
MEDKRNIQIIEWEHLDKKKFYVFGVAMTMMIRVSVYPFTLIRTRLQVQKGKSLYHGTFDAFIKILRADGITGLYRGFLVNTFTLISGQCYVTTYELTRKFVADYSQSNTVKSLVAGGSASLVAQSITVPIDVVSQHLMMQRXGEKMGRFQVRGNPEGQGVVAFGQTKDIIRQILQADGLRGFYRGYVASLLTYIPNSAVWWPFYHFYAEQLSYLCPKECPHIVFQAVSGPLAAATASILTNPMDVIRTRVQVEGKNSIILTFRQLMAEEGPWGLMKGLSARIISATPSTIVIVVGYESLKXXAPVSIQECSHPKGWTHGSF

SEQ ID NO: 2738 - protein, 104 aa, Homo sapiens
  MISC_FEATURE (57): Xaa equals any of the twenty naturally occurring L-amino acids
  MISC_FEATURE (66): Xaa equals any of the twenty naturally occurring L-amino acids
  MISC_FEATURE (67): Xaa equals any of the twenty naturally occurring L-amino acids
MPWCLLPVLSVLHWSTEDTRSCGAQGGGPPLPPRGMAGTVLGVGAGVFILALLWVAXLLLCVLLSXXFRGGEVLCSFFILRCCDHHIILLLFPGVVISSPRSGS

SEQ ID NO: 2739 - protein, 168 aa, Homo sapiens
MGKNFSDSFLSRECVIRMVSGRFYLSCLLLGSLGSMCILFTIYWMQYWRGGFAWNGSIYMFNWHPVLMVAGMVVFYGGASLVYRLPQSWVGPKLPWKLLHAALHLMAFVLTVVGLVAVFTFHNHGRTANLYSLHSWLGITTVFLFACQWFLGFAVFLLPWASMWLRSS

SEQ ID NO: 2740 - protein, 282 aa, Homo sapiens
MSGGWMAQVGAWRTGALGLALLLLLGLGLGLEAAASPLSTPTSAQAAGPSSGSCPPTKFQCRTSGLCVPLTWRCDRDLDCSDGSDEEECRIEPCTQKGQCPPPPGLPCPCTGVSDCSGGTDKKLRNCSRLACLAGELRCTLSDDCIPLTWRCDGHPDCPDSSDELGCGTNEILPEGDATTMGPPVTLESVTSLRNATTMGPPVTLESVPSVGNATSSSAGDQSGSPTAYGVIAAAAVLSASLVTATLLLLSWLRAQERLRPLGLLVAMKESLLLSEQKTSLP

SEQ ID NO: 2741 - protein, 439 aa, Homo sapiens
MVDNLQGDSGRGYYLEMLIGTPPQKLQILVDTGSSNFAVAGTPHSYIDTYFDTERSSTYRSKGFDVTVKYTQGSWTGFVGEDLVTIPKGFNTSFLVNIATIFESENFFLPGIKWNGILGLAYATLAKPSSSLETFFDSLVTQANIPNVFSMQMCGAGLPVAGSGTNGGSLVLGGIEPSLYKGDIWYTPIKEEWYYQIEILKLEIGGQSLNLDCREYNADKAIVDSGTTLLRLPQKVFDAVVEAVARASLIPEFSDGFWTGSQLACWTNSETPWSYFPKISIYLRDENSSRSFRITILPQLYIQPMMGAGLNYECYRFGISPSTNALVIGATVMEGFYVIFDRAQKRVGFAASPCAEIAGAAVSEISGPFSTEDVASNCVPAQSLSEPILWIVSYALMSVCGAILLVLIVLLLLPFRCQRRPRDPEVVNDESSLVRHRWK

SEQ ID NO: 2742 - protein, 151 aa, Homo sapiens
  MISC_FEATURE (19): Xaa equals any of the twenty naturally occurring L-amino acids
  MISC_FEATURE (63): Xaa equals any of the twenty naturally occurring L-amino acids
  MISC_FEATURE (74): Xaa equals any of the twenty naturally occurring L-amino acids
MLRLKQPKPVLQWGEGAFXFPSSWLPLILPQTILNKAKNLSLSPPQATSCPTPACAGFSGTPXAHGWHLSACSXSCLMAAAFPFYFLFSPYLAIFLSDFYNGRGAKIAVLSFGPPGPAGQKPGAGRPWWSSCGWARRERPSRIIISLVLIN

SEQ ID NO: 2743 - protein, 370 aa, Homo sapiens
  MISC_FEATURE (221): Xaa equals any of the twenty naturally occurring L-amino acids
  MISC_FEATURE (231): Xaa equals any of the twenty naturally occurring L-amino acids
  MISC_FEATURE (251): Xaa equals any of the twenty naturally occurring L-amino acids
  MISC_FEATURE (317): Xaa equals any of the twenty naturally occurring L-amino acids
  MISC_FEATURE (369): Xaa equals any of the twenty naturally occurring L-amino acids
MAFRRRTKSYPLFSQEFVIHNHADIGFCLVLCVLIGLMFEVTAKTAFLFILPQYNISVPTADSETVHYHYGPKDLVTILFYIFITIILHAVVQEYILDKISKRLHLSKVKHSKFNESGQLVVFHFTSVIWCFYVVVTEGYLTNPRSLWEDYPHVHLPFQVKFFYLCQLAYWLHALPELYFQKVRKEEIPRQLQYICLYLVHIAGAYLLNLSRLGLILLLLXYSTEFLFHTXRLFYFADENNEKLFSAWAAXFGVTRLFILTLAVLAIGFGLARMENQAFDPEKGNFNTLFCRLCVLLLVCAAQAWLMWRFIHSQLRXWREYWNEQSAKRRVPATPRLPARLIKRESGYHENGVVKAENGTSPRTKKLKXP

SEQ ID NO: 2744 - protein, 184 aa, Homo sapiens
MRLGLSQGIQVWCRWELRKRPRTQNIYQMATFGTTAGFSGIFSNFLFRRCFKVKHDALKTYASLATLPFLSTVVTDKLFVIDALYSDNISKENCVFRSSLIGIVCGVFYPSSLAFTKNGRLATKYHTVPLPPKGRVLIHWMTLCQTQMKLMAIPLVFQIMFGILNGLYHYAVFEETLEKTIHEE

SEQ ID NO: 2745 - protein, 140 aa, Homo sapiens
MAASMHGQPSPSLEDAKLRRPMVIEIIEKNFDYLRKEMTQNIYQMATFGTTAGFSGIFSNFLFRRCFKVKHDALKTYASLATLPFLSTVVTDKLFVIDALYSDNISKENCVFRSSLIGIVCGVFYPSSLAFTKNGRLATK

SEQ ID NO: 2746 - protein, 151 aa, Homo sapiens
MAASSQGNFEGNFESLDLAEFAKKQPWWRKLFGQESGPSAEKYSVATQLFIGGVTGWCTGFIFQKVGKLAATAVGGGFFLLQLANHTGYIKVDWQRVEKDMKKAKEQLKIRKSNQIPTEVRSKAEEVVSFVKKNVLVTGGFFGGFLLGMAS

SEQ ID NO: 2747 - protein, 358 aa, Homo sapiens
  MISC_FEATURE (63): Xaa equals any of the twenty naturally occurring L-amino acids
  MISC_FEATURE (67): Xaa equals any of the twenty naturally occurring L-amino acids
  MISC_FEATURE (132): Xaa equals any of the twenty naturally occurring L-amino acids
  MISC_FEATURE (267): Xaa equals any of the twenty naturally occurring L-amino acids
  MISC_FEATURE (301): Xaa equals any of the twenty naturally occurring L-amino acids
MFASGVVKLTSRCPAWWGLTALTYHYETQCLPTPAAWFAHHLPVWLHKLSVVATFLIEIAVPXLFFXPIRRLRLAAFYSQVLLQVLIIITGNYNFFNLMTLVLTTALLDDQHLAAEPGHGSRKKTATSWPKXLLATLSLLLELAVYGLLAYGTVHYFGLEVDWQQRTIHSRTTFTFHQFSQWLKTLTLPTVWLGVASLVWELLSALWRWTQVRGWLRKLSAVVQLSLVGTATVALFLISLVPYSYVEPGTHGRLWTGAHRLFGAVEXLQLANSYGLFRRMTGLGGRPEVVLEGSYDGHHWXEIEFMYKPGNLSRPPPVVVPHQPRLVLADVVCSPGPTHAQPVVHKPGLAPAAGQGSQ

SEQ ID NO: 2748 - protein, 201 aa, Homo sapiens
MEYHPDLENLDEDGYTQLHFDSQSNTRIAVVSEKGSCAASPPWRLIAVILGILCLVILVIAVVLGTMGVLSSPCPPNWIIYEKSCYLFSMSLNSWDGSKRQCWQLGSNLLKIDSSNELGFIVKQVSSQPDNSFWIGLSRPQTEVPWLWEDGSTFSSNLFQIRTTATQENPSPNCVWIHVSVIYDQLCSVPSYSICEKKFSM

SEQ ID NO: 2749 - protein, 399 aa, Homo sapiens
  MISC_FEATURE (312): Xaa equals any of the twenty naturally occurring L-amino acids
  MISC_FEATURE (383): Xaa equals any of the twenty naturally occurring L-amino acids
  MISC_FEATURE (394): Xaa equals any of the twenty naturally occurring L-amino acids
MSRRDSESTRHDSETEDMLWDDLLHGPECRSSVTSDSEGAHVNTLHSGTKRDPKEDVFQQNHLFWLQNSSPSSDRVSAIIWEGNECKKMDMSVLEISGIIMSRVNAYQQGVGYQMLGNVVTIGLAFFPFLHRLFREKSLDQLKSISAEEILTLFCGAPPVTPIIVLSIINFFERLCLTWMFFFMMCVAERTYKQRFLFAKLFSHITSARKARKYEIPHFRLKKVENIKIWLSLRSYLKRRGPQRSVDVVVSSVFLLTLSIAFICCAQVLQGHKTFLNDAYNWEFLIWETALLLFLLRLASLGSETNKKYSNXSILLTEQINLYLKMEKKPNKKEQLTLVNNVLKLSTKLLKELDTPFRLYGLTMNPLIYNITRVVILSAVSGXISDLLGFNIRXWKIKS

SEQ ID NO: 2750 - protein, 250 aa, Homo sapiens [sequence omitted]

SEQ ID NO: 2751 - protein, 309 aa, Homo sapiens
MAPQSLPSSRMAPLGMLLGLLMAACFTFCLSHQNLKEFALTNPEKSSTKETERKETKAEEELDAEVLEVFHPTHEWQALQPGQAVPAGSHVRLNLQTGEREAKLQYEDKFRNNLKGKRLDINTNTYTSQDLKSALAKFKEGAEMESSKEDKARQAEVKRLFRPIEELKKDFDELNVVIETDMQIMVRLINKFNSSSSSLEEKIAALFDLEYYVHQQPQGPGGGHRRGSPAEAAGHPGHGAAAHCKEEGPVCTVLPAAPLPLCPAAVPEARGAAGPEDPGAGEGHGGARRARGHTALRPGHGEDVRRGGG

SEQ ID NO: 2752 - protein, 171 aa, Homo sapiens
MKKCLLPVLITCMQTAICKDRMMMIMILLVNYRPDEFIECEDPVDHVGNATASQELGYGCLKFGGQAYSDVEHTSVQCHALDGIECASPRTFLRENKPCIKYTGHYFITTLLYSFFLGCFGVDRFCLGHTGTAVGKLLTLGGLGIWWFVDLILLITGGLMPSDGSNWCTVY

SEQ ID NO: 2753 - protein, 216 aa, Homo sapiens
  MISC_FEATURE (18): Xaa equals any of the twenty naturally occurring L-amino acids
  MISC_FEATURE (56): Xaa equals any of the twenty naturally occurring L-amino acids
  MISC_FEATURE (166): Xaa equals any of the twenty naturally occurring L-amino acids
  MISC_FEATURE (178): Xaa equals any of the twenty naturally occurring L-amino acids
  MISC_FEATURE (186): Xaa equals any of the twenty naturally occurring L-amino acids
  MISC_FEATURE (202): Xaa equals any of the twenty naturally occurring L-amino acids
MKSPLAAGKGHPKMRDGXGWHPQDTGLRRGPAFTTQASVHTLLGTWGHACWANPPXAPWHGEGVAGGRQSPCDPRPAGQASNSSPALPASIRQPGMAPVIHLYILILCFQPRVLWKEIPTGPGHSAVSAPTSSKQWSWTPRHMLALPGPQGPRGPTPARVHPRGLXLGSSSHWKGEWXCSFRGGSXLRAWRHLSKRGVREAXGTWAGFTHTLGLGP

SEQ ID NO: 2754 - protein, 870 aa, Homo sapiens
  MISC_FEATURE (534): Xaa equals any of the twenty naturally occurring L-amino acids
MGPPSLVLCLLSATVFSLLGGSSAFLSHHRLKGRFQRDRRNIRPNIILVLTDDQDVELGSMQVMNKTRRIMEQGGAHFINAFVTTPMCCPSRSSILTGKYVHNHNTYTNNENCSSPSWQAQHESRTFAVYLNSTGYRTAFFGKYLNEYNGSYVPPGWKEWVGLLKNSRFYNYTLCRNGVKEKHGSDYSKDYLTDLITNDSVSFFRTSKKMYPHRPVLMVISHAAPHGPEDSAPQYSRLFPNASQHITPSYNYAPNPDKHWIMRYTGPMKPIHMEFTNMLQRKRLQTLMSVDDSMETIYNMLVETGELDNTYIVYTADHGYHIGQFGLVKGKSMPYEFDIRVPFYVRGPNVEAGCLNPHIVLNIDLAPTILDIAGLDIPADMDGKSILKLLDTERPVNRFHLKKKMRVWRDSFLVERGKLLHKRDNDKVDAQEENFLPKYQRVKDLCQRAEYQTACEQLGQKWQCVEDATGKLKLHKCKGPMRLGGSRALSNLVPKYYGQGSEACTCDSGDYKLSLAGRRKKLFKKKYKASYVRXRSIRSVAIEVDGRVYHVGLGDAAQPRNLTKRHWPGAPEDQDDKDGGDFSGTGGLPDYSAANPIKVTHRCYILENDTVQCDLDLYKSLQAWKDHKLHIDHEIETLQNKIKNLREVRGHLKKKRPEECDCHKISYHTQHKGRLKHRGSSLHPFRKGLQEKDKVWLLREQKRKKKLRKLLKRLQNNDTCSMPGLTCFTHDNQHWQTAPFWTLGPFCACTSANNNTYWCMRTINETHNFLFCEFATGFLEYFDLNTDPYQLMNAVNTLDRDVLNQLHVQLMELRSCKGYKQCNPRTRNMDLGLKDGGSYEQYRQFQRRKWPEMKRPSSKSLGQLWEGWEG

SEQ ID NO: 2755 - protein, 141 aa, Homo sapiens
  MISC_FEATURE (104): Xaa equals any of the twenty naturally occurring L-amino acids
  MISC_FEATURE (110): Xaa equals any of the twenty naturally occurring L-amino acids
  MISC_FEATURE (139): Xaa equals any of the twenty naturally occurring L-amino acids
MRPWEMTSNRQPPSVRPSQHHFSGERCNTPARNRRSPPVRRQRGRRDRLSRHNSISQDENYHHLPYAQQQAIGSLEPSTLRMYLPVCYILLLIHPSRMQSWLTXHDQVQXTECLGNTEAEILWQFEIFFLGFLLQILLXFT

SEQ ID NO: 2756 - protein, 278 aa, Homo sapiens
MVFFLIVVICKKFQVPCPVEAALIINETINTTLTQPTALVPALSHNVTENDSCRPHYFIFNSQTVYAVPILIFSFVCHPAVLPIYEELKDRSRRRMMNVSKISFFAMFLMYLLAALFGYLTFYEHVESELLHTYSSILGTDILLLIVRLAVLMAVTLTVPVVIFPIRSSVTHLLCASKDFSWWRHSLITVSILAFTNLLVIFVPTIRDIFGFIGASAASMLIFILPSAFYIKLVKKEPMKSVQKIGALFFLLSGVLVMTGSMALIVLDWVHNAPGGGH

SEQ ID NO: 2757 - protein, 334 aa, Homo sapiens
MLGIMAWNATCKNWLAAEAALEKYYLSIFYGIEFVVGVLGNTIVVYGYIFSLKNWNSSNIYLFNLSVSDLAFLCTLPMLIRSYANGNWIYGDVLCISNRYVLHANLYTSILFLTFISIDRYLIIKYPFREHLLQKKEFAILISLAIWVLVTLELLPILPLINPVITDNGTTCNDFASSGDPNYNLIYSMCLTLLGFLIPLFVMCFFYYKIALFLKQRNRQVATALPLEKPLNLVIMAVVIFSVLFTPYHVMRNVRIASRLGSWKQYQCTQVVINSFYIVTRPLAFLNSVINPVFYFLLGDHFRDMLMNQLRHNFKSLTSFSRWAHELLLSFREK

SEQ ID NO: 2758 - protein, 390 aa, Homo sapiens
  MISC_FEATURE (43): Xaa equals any of the twenty naturally occurring L-amino acids
  MISC_FEATURE (377): Xaa equals any of the twenty naturally occurring L-amino acids
MILNTIYEKVAIMITNFELPRTQTDYENSLTMKMFLFQFVNYXSSCFYIAFFKGKFVGYPGDPVYWLGKYRNEECDPGGCLLELTTQLTIIMGGKAIWNNIQEVLLPWIMNLIGRFHRVSGSEKITPRWEQDYHLQPMGKLGLFYEYLEMIIQFGFVTLFVASFPLAPLLALVNNILEIRVDAWKLTTQFRRLVPEKAQDIGAWQPIMQGIAILAVVTNAMIIAFTSDMIPRLVYYWSFSVPPYGDHTSYTMEGYINNTLSIFKVADFKNKSKGNPYSDLGNHTTCRYRDFRYPPGHPQEYKHNIYYWHVIAAKLAFIIVMEHVIYSVKFFISYAIPDVSKRTKSKIQREKYLTQKLLHENHLKDMTKNMGVIAERXIEAVDNNLRPKSE

SEQ ID NO: 2759 - protein, 101 aa, Homo sapiens
  MISC_FEATURE (48): Xaa equals any of the twenty naturally occurring L-amino acids
MSFAGPRSDLKLSWACCHWVLPLQRLPRSPVAPQDPGSQLLLGDVHCXRRPCSLSTLGRNSGFSEPGAYRRRQELIFVLGLGFLCPQGTVLFLFTPLLYLL

SEQ ID NO: 2760 - protein, 450 aa, Homo sapiens
  MISC_FEATURE (140): Xaa equals any of the twenty naturally occurring L-amino acids
MEEPQKSYVNTMDLERDEPLKSTGPQISVSEFSCHCCYDILVNPTTLNCGHSFCRHCLALWWASSKKTECPECREKWEGFPKVSILLRDAIEKLFPDAIRLRFEDIQQNNDIVQSLAAFQKYGNDQIPLAPNTGRANQQXGGGFFSGVLTALTGVAVVLLVYHWSSRESEHDLLVHKAVAKWTAEEVVLWLEQLGPWASLYRERFLSERVNGRLLLTLTEEEFSKTPYTIENSSHRRAILMELERVKALGVKPPQNLWEYKAVNPGRSLFLLYALKSSPRLSLLYLYLFDYTDTFLPFIHTICPLQEDSSGEDIVTKLLDLKEPTWKQWREFLVKYSFLPYQLIAEFAWDWLEVHYWTSRFLIINAMLLSVLELFSFWRIWSRSELKTVPQRMWSHFWKVSTQGLFVAMFWPLIPQFVCNCLFYWALYFNPIINIDLVVKELRRLETQVL

SEQ ID NO: 2761 - protein, 435 aa, Homo sapiens
MDCSSYSTYCYRCDDFVVNDTKLGLVQKVREHLQNLENSAFTADRHKKRKLLENSTLNSKLLKVNGSTTAICATGLRNLGNTCFMNAILQSLSNIEQFCCYFKELPAVELRNGKTAGRRTYHTRSQGDNNVSLVEEFRKTLCALWQGSQTAFSPESLFYVVWKIMPNFRGYQQQDAHEFMRYLLDHLHLELQGGFNGVSRSAILQENSTLSASNKCCINGASTVVTAIFGGILQNEVNCLICGTESRKFDPFLDLSLDIPSQFRSKRSKNQENGPVCSLRDCLRSFTDLEELDETELYMCHKCKKKQKSTKKFWIQKLPKVLCLHLKRFHWTAYLRNKVDTYVEFPLRGLDMKCYLLEPENSGPESCLYDLAAVVVHHGSGVGSGHYTAYATHEGRWFHFNDSTVTLTDEETVVKAKAYILFYVEHQAKAGSDKL

SEQ ID NO: 2762 - protein, 119 aa, Homo sapiens
  MISC_FEATURE (117): Xaa equals any of the twenty naturally occurring L-amino acids
MKEAHHQAHQVPGERVDIGPQSHLMKVALCPSLAWLSFSSLNEDDDDQPRRTHQRTDLTTWAMRSFGENDALKTCSVCITEYQKATNFVNYLVPMSTMSTASIAGYLRILPVLFVAXQS

SEQ ID NO: 2763 - protein, 115 aa, Homo sapiens
  MISC_FEATURE (87): Xaa equals any of the twenty naturally occurring L-amino acids
  MISC_FEATURE (112): Xaa equals any of the twenty naturally occurring L-amino acids
MSHPGAVDIVAIMIGNLKGTKILQSIQRGIQVTMVIEVGKKHGPWVNHYSIFFVSVSFFIITAATVGYFIFYSARRLRNARAQSRKXRQLKADAKKAIGRLQLRTLKQGDKXNWP

SEQ ID NO: 2764 - protein, 400 aa, Homo sapiens
  MISC_FEATURE (9): Xaa equals any of the twenty naturally occurring L-amino acids
MAWRRREAXVGARGVLALALLALALCVPGARGRALEWFSAVVNIEYVDPQTNLTVWSVSESGRFGDSSPKEGAHGLVGVPWAPGGDLEGCAPDTRFFVPEPGGRGAAPWVALVARGGCTFKDKVLVAARRNASAVVLYNEERYGNITLPMSHAGTGNIVVIMISYPKGREILELVQKGIPVTMTIGVGTRHVQEFISGQSVVFVAIAFITMMIISLAWLIFYYIQRFLYTGSQIGSQSHRKETKKVIGQLLLHTVKHGEKGIDVDAENCAVCIENFKVKDIIRILPCKHIFHRICIDPWLLDHRTCPMCKLDVIKALGYWGEPGDVQEMPAPESPPGRDPAANLSLALPDDDGSDESSPPSASPAESEPQCDPSFKGDAGENTALLEAGRSDSRHGGPIS

SEQ ID NO: 2765 - protein, 419 aa, Homo sapiens
MSCAGRAGPARLAALALLTCSLWPARADNASQEYYTALINVTVQEPGRGAPLTFRIDRGRYGLDSPKAEVRGQVLAPLPLHGVADHLGCDPQTRFFVPPNIKQWIALLQRGNCTFKEKISRAAFHNAVAVVIYNNKSKEEPVTMTHPGTGDIIAVMITELRGKDILSYLEKNISVQMTIAVGTRMPPKNFSRGSLVFVSISFIVLMIISSAWLIFYFIQKIRYTNARDRNQRRLGDAAKKAISKLTTRTVKKGDKETDPDFDHCAVCIESYKQNDVVRILPCKHVFHKSCVDPWLSEHCTCPMCKLNILKALGIVPNLPCTDNVAFDMERLTRTQAVNRRSALGDLAGDNSLGLEPLRTSGISPLPQDGELTPRTGEINIAVTKEWFIIASFGLLSALTLCYMIIRATASLNANEVEWF

SEQ ID NO: 2766 - protein, 199 aa, Homo sapiens
  MISC_FEATURE (8): Xaa equals any of the twenty naturally occurring L-amino acids
  MISC_FEATURE (9): Xaa equals any of the twenty naturally occurring L-amino acids
  MISC_FEATURE (58): Xaa equals any of the twenty naturally occurring L-amino acids
MMMWSWSXXGRKQKEGSKDYQLVTWSRDQTLRMWRVDSQMQRLCANDILDGVDEFIEXISLLPEPEKTLHTEDTDHQHTASHGEEEALKEDPPRNLLEERKSDQLGLPQTLQQEFSLINVQIRNVNVEMDAADRSCTVSVHCSNHRVKMLVKFPAQYPNNAAPSFQFINPTTITSTMKAKLLKVGVWVPKFSLLFCIIV

SEQ ID NO: 2767 - protein, 257 aa, Homo sapiens
  MISC_FEATURE (139): Xaa equals any of the twenty naturally occurring L-amino acids
  MISC_FEATURE (141): Xaa equals any of the twenty naturally occurring L-amino acids
  MISC_FEATURE (152): Xaa equals any of the twenty naturally occurring L-amino acids
  MISC_FEATURE (170): Xaa equals any of the twenty naturally occurring L-amino acids
  MISC_FEATURE (234): Xaa equals any of the twenty naturally occurring L-amino acids
  MISC_FEATURE (238): Xaa equals any of the twenty naturally occurring L-amino acids
MDTSTVGVLLAAKMSQYANLLAAQGSIAAALAFLPDNTNQPNIMQLRDRLCRAQGEPVAGHESPKIPYEKQQLPKGRPGPVAGHHQMPRVQTQQYYPHGENPPPPGFIMHGNVNPNAAGQLPTSPGHMHTQVPPYPQAXAXINQPSRIPSEXGGQQCIDLSSLLLLLLQXLTLTPLTYLLLLPILGSLSCTQHSTRPLHLPPALLLLSLLPLPLEHPSSMADQELHHHLQLMHXLLEXQVHCLLPVSCLRPKEQVCA

SEQ ID NO: 2768 - protein, 357 aa, Homo sapiens
  MISC_FEATURE (118): Xaa equals any of the twenty naturally occurring L-amino acids
  MISC_FEATURE (297): Xaa equals any of the twenty naturally occurring L-amino acids
MSTLESVTYLPEKGLYCQRLPSSRTHGGTESLKGKNTENMGFYGTLKMIFYKMKRKLDHGSEVRSFSLGKKPCKVSEYTSTTGLVPCSATPTTFGDLRAANGQGQQRRRITSVQPPTXLQEWLKMFQSWSGPEKLLALDELIDSCEPTQVKHMMQVIEPQFQRDFISLLPKELALYVLSFLEPKDLLQAAQTCRYWRILAEDNLLWREKCKEEGIDEPLHIKRRKVIKPGFIHSPWKSAYIRQHRIDTNWRRGELKSPKVLKGHDDHVITCLQFCGNRIVSGSDDNTLKVWSAVTGXCLRTLVGHTGGVWSSQMRDNIIISGSTDRTLKVWNAETGECIHTLYGHTSTVRCMHLHEK

SEQ ID NO: 2769 - protein, 155 aa, Homo sapiens
MEFAQISRVKTFQENLSAFKRDPQINILLLPLHTGSNGLTIIEATHVLLVEPILNPAHELQAIGRVHRIGQTKPTIVHRFLIKATIEERMQAMLKTAERRFFEEQALFCFHDITPFSHPWSLTTAILQLRDLVICELFFIYFKNFLICFLSSFSI

SEQ ID NO: 2770 - protein, 291 aa, Homo sapiens
  MISC_FEATURE (16): Xaa equals any of the twenty naturally occurring L-amino acids
MIDSMHQSWLPRVVAXAFQSEDPADPCALLQRRQAQAVTAASTCCPQMPLQKLLFSATLTQNPEKLQQLGLHQPRLFSTGLAHRGLEDTDGDGDSGKYAFPVGLTHHYVPCSLSSKPLVVLHLVLEMGFSRVLCFTNSRENSHRLFLLVQAFGGVDVAEFSSRYGPGQRRMILKQFEQGKIQLLISTDATARGIDVQGVELVVNYDAPQYLRTYVHRVGRTARAGKTGQAFTLLLKVQERRFLRMLTEAGAPELQRHELSSKLLQPLVPRYEEALSQLEESVKEERKQRAA

SEQ ID NO: 2771 - protein, 301 aa, Homo sapiens
  MISC_FEATURE (52): Xaa equals any of the twenty naturally occurring L-amino acids
  MISC_FEATURE (58): Xaa equals any of the twenty naturally occurring L-amino acids
MALQNEKNSRYLLRDWKPENPAFWENKGKHIARRNLWISVSCLLLAFCVWMXFSAVTXNLNKIGFNFTTDQLFLLTALPSVSGALLRVPYSFMVPIFGGRRWTVFSTAILIIPCVWLGIAVQNPNTPFGIFIVIALLCGFAGANFASSMGNISFFFPKAKQGSALGINGGLGNLGVSVMQLVAPLVIFVPVFAFLGVNGVPQADGSVMSLANAAWIWVPLLAIATIAAWSGMNDIASSRASIADQLPVLQRLHLWLLSLLYLAHFGSFIGFSAGFAMLAKTQFPDVNILRLAFFGPFIGAI

SEQ ID NO: 2772 - protein, 301 aa, Homo sapiens
  MISC_FEATURE (208): Xaa equals any of the twenty naturally occurring L-amino acids
MFSHLPFDCVLLLLLLLLTRSSEVEYRAEVGQNAYLPCFYTPAAPGNLVPVCWGKGACPVFECGNVVLRTDERDVNYWTSRYWLNGDFRKGDVSLTIENVTLADSGIYCCRIQIPGIMNDEKFNLKLVIKPAKVTPAPTLQRDFTAAFPRMLTTRGHGPAETQTLGSLPDINLTQISTLANELRDSRLANDLRDSGATIRIGIYIGAXICAGLALALIFGALIFKWYSHSKEKIQNLSLISLANLPPSGLANAVAEGIRSEENIYTIEENVYEVEEPNEYYCYVSSRQQPSQPLGCRFAMP

SEQ ID NO: 2773 - protein, 339 aa, Homo sapiens
  MISC_FEATURE (99): Xaa equals any of the twenty naturally occurring L-amino acids
  MISC_FEATURE (106): Xaa equals any of the twenty naturally occurring L-amino acids
  MISC_FEATURE (113): Xaa equals any of the twenty naturally occurring L-amino acids
MTDCLVIKHFLRKIIMVHPKVRFHFSVKVNGILSTEIFGVENEPTLNLGNGIALLVDSQHYVSRPNFGTIESHCSRIHPVLGHPVMLFIPEDVAGMDLXGELILTXAAALCPXPKVSSNQLNRISSVSIFLYGPLGLPLILSTWEQPMTTFFKDTSSLVDWKKYHLCMIPNLDLNLDRDLVLPDVSYQVESSEEDQSQTMDPQGQTLLLFLFVDFHSAFPVQQMEIWGVYTLLTTHLNAILVESHSVVQGSIQFTVDKVLEQHHQAAKAQQKLQASLSVAVNSIMSILTGSTRSSFRKMCLQTLQAADTQEFRTKLHKVFREITQHQFLHHCSCEVKQR

SEQ ID NO: 2774 - protein, 465 aa, Homo sapiens
  MISC_FEATURE (126): Xaa equals any of the twenty naturally occurring L-amino acids
  MISC_FEATURE (158): Xaa equals any of the twenty naturally occurring L-amino acids
  MISC_FEATURE (161): Xaa equals any of the twenty naturally occurring L-amino acids
  MISC_FEATURE (169): Xaa equals any of the twenty naturally occurring L-amino acids
  MISC_FEATURE (427): Xaa equals any of the twenty naturally occurring L-amino acids
MKRRTDPECTAPIKKQKKRVAELALSLSSTSDDEPPSSVSHGAKASTTSLSGSDSETEGKQHSSDSFDDAFKADSLVEGTSSRYSMYNSVSQKLMAKMGFREGEGLGKYSQGRKDIVEASSQKGRXGLGLTLRGFDQELNVDWRDEPEPSACEQVSWXPEXTTEIPDTXEMSDWMVVGKRKMIIEDETEFCGEELLHSVLQCKSVFDVLDGEEMRRARTRANPYEMIRGVFFLNRAAMKMANMDFVFDRMFTNPRDSYGKPLVKDREAELLYFADVCAGPGGFSEYVLWRKKWHAKGFGMTLKGPNDFKLEDFYSASSELFEPYYGEGGIDGDGDITRPENISAFRNFVLDNTDRKGVHFLMADGGFSVEGQENLQEILSKQLLLCQFLMALSIVRTGGHFICKTFDLFTPFSVGLVYLLYCCFERXCLFKPITSRPANSERYVVCKGLKVGIDDVRDYLFAVNI

SEQ ID NO: 2775 - protein, 606 aa, Homo sapiens
MDSQRELAEELRLYQSTLLQDGLKDLLDEKKFIDCTLKAGDKSLPCHRLILSACSPYFREYFLSEIDEAKKKEVVLDNVDPAILDLIIKYLYSASIDLNDGNVQDIFALASRFQIPSVFTVCVSYLQKRLAPGNCLAILRLGLLLDCPRLAISAREFVSDRFVQICKEEDFMQLSPQELISVISNDSLNVEKEEAVFEAVMKWVRTDKENRVKNLSEVFDCIRFRLMTEKYFKDHVEKDDIIKSNPDLQKKIKVLKDAFAGKLPEPSKNAAKTGAGEVNGDVGDEDLLPGYLNDIPRHGMFVKDLILLVNDTAAVAYDPTENECYLTALAEQIPRNHSSIVTQQNQIYVVGGLYVDEENKDQPLQSYFFQLDSIASEWVGLPPLPSARCLFGLGEVDDKIYVVAGKDLQTEASLDSVLCYDPVAAKWNEVKKLPIKVYGHNVISHKGMIYCLGGKTDDKKCTNRVFIFNPKKGDWKDLAPMKIPRSMFGVAVHKGKIVIAGGVTEDGLSASVEAFDLTTNKWDVMTEFPQERSSISLVSLAGSLYAIGGFAMIQLESKEFAPTEVNDIWKYEDDKKEWAGMLKEIRYASGASCLATRLNLFKLSKL

SEQ ID NO: 2776 - protein, 386 aa, Homo sapiens
MEAEVLQRLHDKLDPSPLRDTVASALMYHRNESLQPSLQSPQTELRSDFQCVVGFGGIHSTPSTVLSDQAKYLNPLLGEWKHFTASLAPRMSNQGIAVLNNFVYLIGGDNNVQGFRAESRCWRYDPRHNRWFQIQSLQQEHADLSVCVVGRYIYAVAGRDYHNDLNAVERYDPATNSWAYVAPLKREVYAHAGATLEGKMYITCGRRGEDYLKETHCYDPGSNTWHTLADGPVRRAWHGMATLLNKLYVIGGSNNDAGYRRDVHQVACYSCTSGQWSSVCPLPAGHGEPGIAVLDNRIYVLGGRSHNRGSRTGYVHIYDVEKDCWEEGPQLDNSISGLAACVLTLPRSLLLEPPRGTPDRSQADPDFASEVMSVSDWEEFDNSSED

SEQ ID NO: 2777 - protein, 239 aa, Homo sapiens
  MISC_FEATURE (54): Xaa equals any of the twenty naturally occurring L-amino acids
MHLEQQMLLKRLGNAYAVLSNPEKRKQYDLTGNEEQACNHQNNGRFNFHRGCEXDITPEDLFNIFFGGGFPSGSVHSFSNGRAGYSQQHQHRHSGHEREEERGDGGFSVFIQLMPIIVLILVSLLSQLMVSNPPYSLYPRSGTGQTIKMQTENLGVVYYVNKDFKNEYKGMLLQKVEKSVEEDYVTNIRNNCWKERQQKTDMQYAAKVYRDDRLRRKADALSMDNCKELERLTSLYKGG

SEQ ID NO: 2778 - protein, 351 aa, Homo sapiens
  MISC_FEATURE (187): Xaa equals any of the twenty naturally occurring L-amino acids
  MISC_FEATURE (192): Xaa equals any of the twenty naturally occurring L-amino acids
  MISC_FEATURE (195): Xaa equals any of the twenty naturally occurring L-amino acids
MIAKEELESVLEEEVDDFPTFGDSQSDYDTVVHPFYAYWQSFCTQKNFAWKEEYDTRQASNRWEKRAMEKENKKIRDKARKEKNELVRQLVAFIRKRDKRVQAHRKLVEEQNAEKARKAEEMRRQQKLKQAKLVEQYREQSWMTMANLEKELQEMEARYEKEFGDGSDENEMEEHELKDEEDGKDSXEAEDXELXDDLYCPACDKSFKTEKAMKNHEKSKKHREMVALLKQQLEEEEENFSRPQIDENPLDDNSEEEMEDAPKQKLSKKQKKKKQKPAQDVPGKDSYLPAAHFQMAWGKKCVLGERRDGESEHKCAKMLLENRQVRLGYVCQASFFYNACLLLPLFVTVEE

SEQ ID NO: 2779 - protein, 163 aa, Homo sapiens
  MISC_FEATURE (137): Xaa equals any of the twenty naturally occurring L-amino acids
  MISC_FEATURE (145): Xaa equals any of the twenty naturally occurring L-amino acids
  MISC_FEATURE (146): Xaa equals any of the twenty naturally occurring L-amino acids
  MISC_FEATURE (148): Xaa equals any of the twenty naturally occurring L-amino acids
MKSDLTRWRNPTNVRNVGKNSVVPVPFTDMKELIVEENSTNVKNVPKSLDVPRPFKHMKELTLEKDLMNVINVVKPSIIPVVFEDIKKTHSGEKPYECTRCGKAFGWCSSLRRHEMTHTGEKPFFCKQCGKVFTFSXYLRLQERXXWXGVPVAFGRRQGGPPP

SEQ ID NO: 2780 - protein, 546 aa, Homo sapiens
  MISC_FEATURE (534): Xaa equals any of the twenty naturally occurring L-amino acids
  MISC_FEATURE (537): Xaa equals any of the twenty naturally occurring L-amino acids
MEHCLKHGLKVKKSFIGQNKSFFGPLELVEKLCPEASDIATSVRNLPELKTAVGRGRAWLYLALMQKKLADYLKVLIDNKHLLSEFYEPEALMMEEEGMVIVGLLVGLNVLDANLCLKGEDLDSQVGVIDFSLYLKDVQDLDGGKEHERITDVLDQKNYVEELNRHLSCTVGDLQTKIDGLEKTNSKLQEELSAATDRICSLQEEQQQLREQNELIRERSEKSVEITKQDTKVELETYKQTRQGLDEMYSDVWKQLKEEKKVRLELEKELELQIGMKTEMEIAMKLLEKDTHEKQDTLVALRQQLEEVKAINLQMFHKAQNAESSLQQKNEAITSFEGKTNQVMSSMKQMEERLQHSERARQGAEERSHKLQQELGGRIGALQLQLSQLHEQCSSLEKELKSEKEQRQALQRELQHEKDTSSLLRMELQQVEGLKKELRELQDEKAELQKICEEQEQALQEMGLHLSQSKLKMEDIKEVNQALKGHAWLKDDEATHCRQCEKEFSISRRKHHCRNCGHIFCNTCSSNELALPSXPKXVRVCDTGHT

SEQ ID NO: 2781 - protein, 209 aa, Homo sapiens
  MISC_FEATURE (79): Xaa equals any of the twenty naturally occurring L-amino acids
  MISC_FEATURE (170): Xaa equals any of the twenty naturally occurring L-amino acids
  MISC_FEATURE (197): Xaa equals any of the twenty naturally occurring L-amino acids
MKVSLGNGEMGVSAHLQPCKAGTTRFFTSNTHSSVVLQGFDQLRIEGLLCDVTLVPGDGDEIFPVHRAMMASASDYFKXMFTGGMKEQDLMCIKLHGVNKVGLKKIIDFIYTAKLSLNMDNLQDTLEAASFLQILPVLDFCKVFLISGVSLDNCVEVGRIANTYNLIEVXKYVNNFILKNFPALLSTGEFLKLPFEXLAFVLSSNSLST

SEQ ID NO: 2782 - protein, 156 aa, Homo sapiens
  MISC_FEATURE (94): Xaa equals any of the twenty naturally occurring L-amino acids
  MISC_FEATURE (134): Xaa equals any of the twenty naturally occurring L-amino acids
  MISC_FEATURE (143): Xaa equals any of the twenty naturally occurring L-amino acids
MPQASYIMTELMLVKSPMNVKNVGKLLVMLHILLFMREFIPVINPMNVKDVGRHFTVPHILLDMKAFMLMEIPICVKSVGKLLIVAMNLVYIIXFILVRNPLNVTNAEGPLGLDPSLEVHQRNSYLVRGIVGIXQVGKGKAHXVHGFYPHWNIFGL

SEQ ID NO: 2783 - protein, 324 aa, Homo sapiens
MSVEDGGMPGLGRPRQARWTLMLLLSTAMYGAHAPLLALCHVDGRVPFRPSSAVLLTELTKLLLCAFSLLVGWQAWPQGPPPWRQAAPFALSALLYGANNNLVIYLQRYMDPSTYQVLSNLKIGSTAVLYCLCLRHRLSVRQGLALLLLMAAGACYAAGGLQVPGNTLPSPPPAAAASPMPLHITPLGLLLLILYCLISGLSSVYTELLMKRQRLPLALQNLFLYTFGVLLNLGLHAGGGSGPGLLEGFSGWAALVVLSQALNGLLMSAVMKHGSSITRLFVVSCSLVVNAVLSAVLLRLQLTAAFFLATLLIGLAMRLYYGSR

SEQ ID NO: 2784 - protein, 365 aa, Homo sapiens
  MISC_FEATURE (304): Xaa equals any of the twenty naturally occurring L-amino acids
  MISC_FEATURE (323): Xaa equals any of the twenty naturally occurring L-amino acids
MGRWALDVAFLWKAVLTLGLVLLYYCFSIGITFYNKWLTKSFHFPLFMTMLHLAVIFLFSALSRALVQCSSHRARVVLSWADYLRRVAPTALATALDVGLSNWSFLYVTVSLYTMTKSSAVLFILIFSLIFKLEELRAALVLVVLLIAGGLFMFTYKSTQFNVEGFALVLGASFIGGIRWTLTQMLLQKAELGLQNPIDTMFHLQPLMFLGLFPLFAVFEGLHLSTSEKIFRFQDTGLLLRVLGSLFLGGILAFGLGFSEFLLVSRTSSLTLSIAGIFKEVCTLLLAAHLLGDQISLLNWLGFXLCLSGISLHVALKALHSRXDGGPKALKGLGSSPDLELLLRSSQREEGDNEEEEYFVAQGQQ

SEQ ID NO: 2785 - protein, 393 aa, Homo sapiens
MSPSLDSRSFPVWSWGLGNRGAGPPVTEEEWARHVGPEGRLQQVPELKNRIFSGGLSPSLRREAWKFLLGYLSWEGTAEEHKAHIRKKTDEYFRMKLQWKSVSPEQERRNSLLHGYRSLIERDVSRTDRTNKFYEGPENPGLGLLNDILLTYCMYHFDLGYVQGMSDLLSPILYVIQNEVDAFWCFCGFMELVQGNFEESQETMKRQLGRLLLLLRVLDPLLCDFLDSQDSGSLCFCFRWLLIWFKREFPFPDVLRLWEVLWTGLPGPNLHLLVACAILDMERDTLMLSGFGSNEILKHINELTMKLSVEDVLTRAEALHRQLTACPELPHNVQEILGLAPPAEPHSPSPTASPLPLSPTRAPPTPPPSTDTAPQPDSSLEILPEEEDEGADS

SEQ ID NO: 2786 - protein, 367 aa, Homo sapiens
MPFAFFFLESEGFAGLKKGIRARILETLVMLLLLALLILGIVWVASALIDNDAASMESLYDLWEFYLPYLYSCISLMGCLLLLLCTPVGLSRMFTVMGQLLVKPTILEDLDEQIYIITLEEEALQRRLNGLSSSVEYNIMELEQELENVKTLKTKLERRKKASAWERNLVYPAVMVLLLIETSISVLLVACNILCLLVDETAMPKGTRGPGIGNASLSTFGFVGAALEIILIFYLMVSSVVGFYSLRFFGNFTPKKDDTTMTKIIGNCVSILVLSSALPVMSRTLGITRFDLLGDFGRFNWLGNFYIVLSYNLLFAIVTTLCLVRKFTSAVREELFKALGLHKLHLPNTSRDSETAKPSVNGHQKAL

SEQ ID NO: 2787 - protein, 412 aa, Homo sapiens
  MISC_FEATURE (176): Xaa equals any of the twenty naturally occurring L-amino acids
  MISC_FEATURE (271): Xaa equals any of the twenty naturally occurring L-amino acids
  MISC_FEATURE (272): Xaa equals any of the twenty naturally occurring L-amino acids
  MISC_FEATURE (276): Xaa equals any of the twenty naturally occurring L-amino acids
  MISC_FEATURE (277): Xaa equals any of the twenty naturally occurring L-amino acids
  MISC_FEATURE (297): Xaa equals any of the twenty naturally occurring L-amino acids
  MISC_FEATURE (327): Xaa equals any of the twenty naturally occurring L-amino acids
MSGDKLLSELGYKLGRTIGEGSYSKVKVATSKKYKGTVAIKVVDRRRAPPDFVNKFLPRELSILRGVRHPHIVHVFEFIEVCNGKLYIVMEAAATDLLQAVQRNGRIPGVQARDLFAQIAGAVRYLHDHHLVHRDLKCENVLLSPDERRVKLTDFGFGRQAHGYPDLSTTYCGSAXYASPEVLLGIPYDPKKYDVWSMGVVLYVMVTGCMPFDDSDIAGLPRRQKRGVLYPEGLELSERCKALIAELLQFSPSAGPSAGQVARNCWLRAGXXRLEXXWFQPFLQPRALGQGGARARXALRGNMRSCRVLLHMRFFPSASLPFFPRGXPQLPLFGIHVPRDPGSWRRMRIRDSLRPGPERARPEGTEALRLRGTLSLCAEGVPSQPAVGARFPVGTCNKLAVPRKKKKKKKTR

SEQ ID NO: 2788 - protein, 146 aa, Homo sapiens
  MISC_FEATURE (94): Xaa equals any of the twenty naturally occurring L-amino acids
MEQRHVLLKQKELGGEEPEPSLREGPGGLVMEGHLFKRASNAFKTWSRRWFTIQSNQLVYQKKYKDPVTVVVDDLRLCTVNSALTQKGGSALRXCPPASPASSRLTQSASCSCGSVLCRAALLLPSVRLALMTAPGVQARAQDTWP

SEQ ID NO: 2789 - protein, 174 aa, Homo sapiens
  MISC_FEATURE (51): Xaa equals any of the twenty naturally occurring L-amino acids
  MISC_FEATURE (76): Xaa equals any of the twenty naturally occurring L-amino acids
MRCKIAQGAANGINFLHENHHIHRDIKSANILLDEAFTAKISDFGLARASXKFAQTVMTSRIVGTTAYMAPEALRXEITPKSDIYSFGVVLLEIITGLPAVDEHREPQLLLDIKEEIEDEEKTIEDYIDKKMNDADSTSVEAMYSVASQCLHEKKNKRPDIKKVQQLLQEMTAS

SEQ ID NO: 2790 - protein, 365 aa, Homo sapiens
MNIMDFNVKKLAADAGTFLSRAVQFTEEKLGQAEKTELDAHLENLLSKAECTKIWTEKIMKQTEVLLQPNPNARIEEFVYEKLDRKAPSRINNPELLGQYMIDAGTEFGPGTAYGNALIKCGETQKRIGTADRELIQTSALNFLTPLRNFIEGDYKTIAKERKLLQNKRLDLDAAKTRLKKAKAAETRNSSEQELRITQSEFDRQAEITRLLLEGISSTHAHHLRCLNDFVEAQMTYYAQCYQYMLDLQKQLGSFPSNYLSNNNQTSVTPVPSVLPNAIGSSAMASTSGLVITSPSNLSDLKECSGSRKARVLYDYDAANSTELSLLADEVITVFSVVGMDSDWLMGERGNQKGKVPITYLELLN

SEQ ID NO: 2791 - protein, 372 aa, Homo sapiens
MATSPQKSPSVPKSPTPKSPPSRKKDDSFLGKLGGTLARRKKAKEVSELQEEGMNAINLPLSPIPFELDPEDTMLEENEVRTMVDPNSRSTPKLQELMKVLIDWINDVLVGERIIVKDLAEDLYDGQVLQKLFEKLESEKLNVAEVTQSEIAQKQKLQTVLEKINETLKLPPRSIKWNVDSVHAKSLVAILHLLVALSQYFRAPIRLPDHVSIQVVVVQKREGILQSRQIQEEITGNTEALSGRHERDAFDTLFDHAPDKLNVVKKTLITFVNKHLNKLNLEVTELETQFADGVYLVLLMGLLEGYFVPLHSFFLTPDSFEQKVLNVSFAFELMQDGGLEKPKPRPEDIVNCDLKSTLRVLYNLFTKYRNVE

SEQ ID NO: 2792 - protein, 338 aa, Homo sapiens
  MISC_FEATURE (137): Xaa equals any of the twenty naturally occurring L-amino acids
MTLRDDQPAKLEKEPKTRPEENKPERPSGRKPRPMGIIAANVEKHYETGRVIGDGNFAVVKECRHRETRQAYAMKIIDKSRLKGKEDMVDSEILIIQSLSHPNIVKLHEVYETDMEIYLILEYVQGGDLFDAIIESXKFPEPDAALMIMDLCKALVHMHDKSIVHRDLKPENLLVQRNEDKSTTLKLADFGLAKHVVRPIFTVCGTPTYVAPEILSEKGYGLEVDMWAAGVILYILLCGFPPFRSPERDQDELFNIIQLGHFEFLPPYWDNISDAAKDLVSRLLVVDPKKRYTAHQVLQHPWIETAGKTNTVKRQKQVSPSSEGHFRSQHKRVVEQVS

SEQ ID NO: 2793 - protein, 363 aa, Homo sapiens
  MISC_FEATURE (52): Xaa equals any of the twenty naturally occurring L-amino acids
  MISC_FEATURE (159): Xaa equals any of the twenty naturally occurring L-amino acids
  MISC_FEATURE (339): Xaa equals any of the twenty naturally occurring L-amino acids
  MISC_FEATURE (346): Xaa equals any of the twenty naturally occurring L-amino acids
  MISC_FEATURE (359): Xaa equals any of the twenty naturally occurring L-amino acids
MAPAPIWLCWAAGQVVRRLCASTEDCEVDPSKCPASELPEHQARLRNSCEEXPRLTIHCLFCTSWFPAELGIVFSSWREACKERGSEVLGPRLVCASLFLRLLCPAILAPSLFGLAPDHPAPGPARTLTLIAKVIQNLANRAPFGEKEAYMGFMNSFLXEHGPAMQCFLDQVAMVDVDAAPSGYQGSGDLALQLAVLHAQLCTIFAELDQTTRDTLEPLPTILRAIEEGQPVLVSVPMRLPLPPAQVHSSLSAGRSPASWPPGTSPSTPLSSPRASLCAVSPLRELGPATAGRRAAPAAAPAGAAHAECPGPASCPPPPICGALAATQRLPEHGTSAPXPALDPGXRFAASEASVTLAXPNWN

SEQ ID NO: 2794 - protein, 108 aa, Homo sapiens
  MISC_FEATURE (19): Xaa equals any of the twenty naturally occurring L-amino acids
  MISC_FEATURE (22): Xaa equals any of the twenty naturally occurring L-amino acids
  MISC_FEATURE (47): Xaa equals any of the twenty naturally occurring L-amino acids
  MISC_FEATURE (81): Xaa equals any of the twenty naturally occurring L-amino acids
  MISC_FEATURE (85): Xaa equals any of the twenty naturally occurring L-amino acids
MNGPAGLAGRLQEHAEPKXQAXQEGPLQKPSDGGAEPEPWADAVPSXAGPRAEGGLAEEAEEHHEELAAALVLCCVGISFXTTRXKMRSSPRRISEGSSAIRSHRRLI

SEQ ID NO: 2795 - protein, 198 aa, Homo sapiens
  MISC_FEATURE (97): Xaa equals any of the twenty naturally occurring L-amino acids
  MISC_FEATURE (107): Xaa equals any of the twenty naturally occurring L-amino acids
  MISC_FEATURE (198): Xaa equals any of the twenty naturally occurring L-amino acids
MFFLFSDMLLYTSKGVAGTSHFRIRGLLPLQGMLVEESDNEWSVPHCFTIYAAQKTIVVAASTRLEKEKWMLDLNSAIQAAKSGGDTAPALPGRTVXLVPPDPPTRXLWSRSQKMMLGVSAAPWRGMAAPGQHHNARVLGTGTPACPGQDHSAAVENQAFRISAKKVQKQVMGWQKLWVVFTNFCFVLLTKLIRDDYX

SEQ ID NO: 2796 - protein, 107 aa, Homo sapiens
MGHIKLTDFGLSKVGLMSMTTNLYEGHIEKDAREFLDKQVCGTPEYIAPEVILRQGYGKPVDWWAMGIILYEFLVGCVPFFGDTPEGYLDKSSVMRSTGLRRMRHPT

SEQ ID NO: 2797 - protein, 262 aa, Homo sapiens
  MISC_FEATURE (22): Xaa equals any of the twenty naturally occurring L-amino acids
  MISC_FEATURE (106): Xaa equals any of the twenty naturally occurring L-amino acids
  MISC_FEATURE (110): Xaa equals any of the twenty naturally occurring L-amino acids
MEERLAEFISSNTPDSVLPLAXGALSFIHHQVIEMARDCLDKSRSGLITSQYFYELQENLEKLLQDAHERSESSEVAFVMQLVKKLMIIIARPARLLECLEFDPEXFYHXLEAAEGHAKEGQGIKCDIPRYIVSQLGLTRDPLEEMAQLSSCDSPDTPETDDSIEGHGASLPSKKTPSEEDFETIKLISNGAYGAVFLVRHKSTRQRFAMKKINKQNLILRNQIQQAFVERDILTFAENPFVVSMFCSFDTKRQLCMVMELR

SEQ ID NO: 2798 - protein, 171 aa, Homo sapiens
  MISC_FEATURE (84): Xaa equals any of the twenty naturally occurring L-amino acids
  MISC_FEATURE (101): Xaa equals any of the twenty naturally occurring L-amino acids
MEDEDEQGWCKERLDNGQIMWRRSSDESGTGQRGDGGGGPRSLSQPRGHPLLFLQEMMVPLLLASWCSWKADELVISPGTRHLXECSWRDLSAGRRRTTEXAAPPRPLSCWPIIDLYVLDFVSPFRVNGGLHLILVPLITLLRNGVHSTWQPKWTRLTFPIWNEGIWRFFF

SEQ ID NO: 2799 - protein, 121 aa, Homo sapiens [sequence omitted]

SEQ ID NO: 2800 - protein, 198 aa, Homo sapiens
  MISC_FEATURE (172): Xaa equals any of the twenty naturally occurring L-amino acids
MEASVILPILKKKLAFLSGGKDRRSGLILTIPLCLEQTNMDELSVTLDYLLSIPSEKCKARGFTVIVDGRKSQWNVVKTVVVMLQNVVPAEVSLVCVVKPDEFWDKKVTHFCFWKEKDRLGFEVILVSANKLTRYIEPCQLTEDFGGSLTYDHMDWLNKRLVFEKFTKESTXLLDELALINNGKCIKEISKRKKGLWI

SEQ ID NO: 2801 - protein, 179 aa, Homo sapiens
MVALNFQTPGLPMDLQNGKFLDNGGSGYILKPHFLRESKSYFNPSNIKEGMPITLTIRLISGIQLPLTHSSSNKGDSLVIIEVFGVPNDQMKQQTRVIKKNAFSPRWNETFTFIIHVPELALIRFVVEGQGLIAGNEFLGQYTLPLLCMNKGYRRIPLFSRMGESLEPASLFVYVWYVR

SEQ ID NO: 2802 - protein, 306 aa, Homo sapiens
  MISC_FEATURE (11): Xaa equals any of the twenty naturally occurring L-amino acids
  MISC_FEATURE (27): Xaa equals any of the twenty naturally occurring L-amino acids
  MISC_FEATURE (295): Xaa equals any of the twenty naturally occurring L-amino acids
  MISC_FEATURE (297): Xaa equals any of the twenty naturally occurring L-amino acids
  MISC_FEATURE (300): Xaa equals any of the twenty naturally occurring L-amino acids
  MISC_FEATURE (304): Xaa equals any of the twenty naturally occurring L-amino acids
MHTLHTRAASXYSSWAEEQRHLETGAXKIEADSRTLWAHCWCPLLQGIACLCCDARRQVRMQALTYLQRALLVHDLQKLDALEWESCFNKVLFPLLTKLLENISPADVGGMEETRMRASTLLSKVFLQHLSPLLSLSTFAALWLTILDFMDKYMHAGSSDLLSEAIPESLKNMLLVMDTAEIFHSADARGGGPSALWEITWERIDCFLPHLRDELFKQTVIQDPMPMEPQGQKPLASAHLTSAAGDTRTPGHPPPPEIPSELGACDFEKPESPRAASSSSPGSPVASSPSRLSPXPXGLXPWLXPH

SEQ ID NO: 2803 - protein, 355 aa, Homo sapiens
  MISC_FEATURE (313): Xaa equals any of the twenty naturally occurring L-amino acids
  MISC_FEATURE (314): Xaa equals any of the twenty naturally occurring L-amino acids
MREDWIEEECHRVEAQLALKEARKEIKQLKQVIETMRSSLADKDKGIQKYFVDINIQNKKLESLLQSMEMAHSGSLRDELCLDFPCDSPEKSLTLNPPLDTMADGLSLEEQVTGEGADRELLVGDSIANSTDLFDEIVTATTTESGDLELVHSTPGANVLELLPIVMGQEEGSVVVERAVQTDVVPYSPAISELIQSVLQKLQDPCPSSLASPDESEPDSMESFPESLSALVVDLTPRNPNSAILLSPVETPYANVDAEVHANRLMRELDFAACVEERLDGVIPLARGGVVRQYWSSSFLVDLLAVAAPVVPXXLWAFSTQRGGTDPVYNIGALLRGCCVVALHSLRRTAFRIKT

SEQ ID NO: 2804 - protein, 141 aa, Homo sapiens
MEQKHRCKFAMKEIVQFMASGRLGPVGVPVLCHVEEVPDREQGAAPTLCPSMEEGNAKGVMSRVIFATVTLAQPMVTGVLGVAGEHAAGRVTEGRCGGTAHVITLLPPMGEELVGDQTPRSRGATLTCVLWMEVGEAGIVE

SEQ ID NO: 2805 - protein, 329 aa, Homo sapiens
  MISC_FEATURE (53): Xaa equals any of the twenty naturally occurring L-amino acids
  MISC_FEATURE (62): Xaa equals any of the twenty naturally occurring L-amino acids
  MISC_FEATURE (306): Xaa equals any of the twenty naturally occurring L-amino acids
MPGKHQHFQEPEVGCCGKYFLFGFNIVFWVLGALFLAIGLWAWGEKGVLSNIXALTDLGGLXPVWLFVVVGGVMSVLGFAGCIGALRENTFLLKFFSVFLGLIFFLELATGILAFVFKDWIRDQLNLFINNNVKAYRDDIDLQNLIDFAQEYWSCCGARGPNDWNLNIYFNCTDLNPSRERCGVPFSCCVRDPAEDVLNTQCGYDVRLKLELEQQGFIHTKGCVGQFEKWLQDNLIVVAGVFMGIALLQIFGICLAQNLVSDIKAVKANWSKWNDDFENHWLTPTISEVLSTAGPQQNSLTGAPGXAPPSRHVFFGLGGLYPEPTFKNW

SEQ ID NO: 2806 - protein, 511 aa, Homo sapiens
MISDNSAENIALVTSMYDGLLQAGARLCPTVQLEDIRNLQDLTPLKLAAKEGKIEIFRHILQREFSGLSHLSRKFTEWCYGPVRVSLYDLASVDSCEENSVLEIIAFHCKSPHRHRMVVLEPLNKLLQAKWDLLIPKFFLNFLCNLIYMFIFTAVAYHQPTLKKQAAPHLKAEVGNSMLLTGHILILLGGIYLLVGQLWYFWRRHVFIWISFIDSYFEILFLFQALLTVVSQVLCFLAIEWYLPLLVSALVLGWLNLLYYTRGFQHTGIYSVMIQKVILRDLLRFLLIYLVFLFGFAVALVSLSQEAWRPEAPTGPNATESVQPMEGQEDEGNGAQYRGILEASLELFKFTIGMGELAFQEQLHFRGMVLLLLLAYVLLTYILLLNMLIALMSETVNSVATDSWSIWKLQKAISVLEMENGYWWCRKKQRAGVMLTVGTKPDGSPDERWCFRVEEVNWASWEQTLPTLCEDPSGAGVPRTLENPVLASPPKEDEDGASEENYVPVQLLQSN

SEQ ID NO: 2807 - protein, 190 aa, Homo sapiens
  MISC_FEATURE (179): Xaa equals any of the twenty naturally occurring L-amino acids
  MISC_FEATURE (189): Xaa equals any of the twenty naturally occurring L-amino acids
MAASSISSPWGKHVFKAILMVLVALILLHSALAQSRRDFAPPGQQKREAPVDVLTQIGRSVRGTLDAWIGPETMHLVSESSSQVLWAISSAISVAFFALSGIAAQLLNALGLAGDYLAQGLKLSPGQVQTFLLWGAGALVVYWLLSLLLGLVLALLGRILWGLKLVIFLAGFVALMRSXPDPSTRPCYXW

SEQ ID NO: 2808 - protein, 144 aa, Homo sapiens
  MISC_FEATURE (78): Xaa equals any of the twenty naturally occurring L-amino acids
MVGLHTFGQCTLTIGISDINDNCPLFTDSQINVTVYGNATVGTPIAAVQAVDKDLGTNAQITYSYSQKVPQASKDLFXLDENTGVIKLFSKIGGSVLESHKLTILANGPGCIPAVITALVSIIKVIFRPPEIVPRYIANEIDGV

SEQ ID NO: 2809 - protein, 465 aa, Homo sapiens
  MISC_FEATURE (333): Xaa equals any of the twenty naturally occurring L-amino acids
  MISC_FEATURE (406): Xaa equals any of the twenty naturally occurring L-amino acids
MLALGNNHFIGFVNDSVTKSIVALRLTLVVKVSTCVPGESHANDLECSGKGKCTTKPSEATFSCTCEEQYVGTFCEEYDACQRKPCQNNASCIDANEKQDGSNFTCVCLPGYTGELCQSKIDYCILDPCRNGATCISSLSGFTCQCPEGYFGSACEEKVDPCASSPCQNNGTCYVDGVHFTCNCSPGFTGPTCAQLIDFCALSPCAHGTCRSVGTSYKCLCDPGYHGLYCEEEYNECLSAPCLNAATCRDLVNGYECVCLAEYKGTHCELYKDPCANVSCLNGATCDSDGLNGTCICAPGFTGEECDIDINECDSNPCHHGGSCLDQPNGYNXHCPHGWVGANCEIHLQWKSGHMAESLTNMPRHSLYIIIGALCVAFILMLIILIVGICRISRIEYQGSSRPAYXEFYNCRSIDSEFSNAIASIRHARFGKKSRPAMYDVSPIAYEDYSPDDKPLVTLIKTKDL

SEQ ID NO: 2810 - protein, 197 aa, Homo sapiens
  MISC_FEATURE (121): Xaa equals any of the twenty naturally occurring L-amino acids
  MISC_FEATURE (163): Xaa equals any of the twenty naturally occurring L-amino acids
MCLGGTSPFLPQVEAHNTVTSGTATTVIEIQVSEQEPPSTAQTPEAGTSQPMPPGMGTSTSHQPTTPGGGTAQTPEPGTSQPMPLSKSTPSSGGGPSEDKRFSVVDMAALGGVLGALLLLXLLGLAVLVHKHYGPRSSAALAKLRSPSPKALTTRRSSLTTRXTGRPSPAPRTTPSPRRHRCPQSPHPPALPPQAVP

SEQ ID NO: 2811 - protein, 184 aa, Homo sapiens
MGNGMNKILPGLYIGNFKDARDAEQLSKNKVTHILSVHDSARPMLEGVKYLCIPAADSPSQNLTRHFKESIKFIHECRLRGESCLVHCLAGVSRSVTLVIAYIMTVTDFGWEDALHTVRAGRSCANPNVGFQRQLQEFEKHEVHQYRQWLKEEYGESPLQDAEEAKNILAAPGILKFWAFLRRL

SEQ ID NO: 2812 - protein, 123 aa, Homo sapiens
  MISC_FEATURE (38): Xaa equals any of the twenty naturally occurring L-amino acids
  MISC_FEATURE (46): Xaa equals any of the twenty naturally occurring L-amino acids
  MISC_FEATURE (82): Xaa equals any of the twenty naturally occurring L-amino acids
  MISC_FEATURE (123): Xaa equals any of the twenty naturally occurring L-amino acids
MRPHGAWLGRAGRVRVLEDGTLEIRSVQLRDRGAYVCXVSNVAGNXSLRTWLEVIQVEPPNGTLSDPNITVPGIPGPFFLDXRGVAMVLEVGFLPFLTSVTLCFGLIALGSKGKGRVKHHMTX

SEQ ID NO: 2813 - protein, 185 aa, Homo sapiens
MSPRSCLRSLRLLVFAVFSAAASNWLYLAKLSSVGSISEEETCEKLKGLIQRQVQMCKRNLEVMDSVRRGAQLAIEECQYQFRNRRWNCSTLDSLPVFGKVVTQGTREAAFVYAISSAGVAFAVTRACSSGELEKCGCDRTVHGVSHRASSGQDALTTSPTVWPSHSRLWMCGREARGPRPAEPS

SEQ ID NO: 2814 - protein, 130 aa, Homo sapiens [sequence omitted]

SEQ ID NO: 2815 - protein, 364 aa, Homo sapiens
MAASGPGCRSWCLCPEVPSATFFTALLSLLVSGPRLFLLQQPLAPSGLTLKSEALRNWQVYRLVTYIFVYENPISLLCGAIIIWRFAGNFERTVGTVRHCFFTVIFAIFSAIIFLSFEAVSSLSKLGEVEDARGFTPVAFAMLGVTTVRSRMRRALVFGMVVPSVLVPWLLLGASWLIPQTSFLSNVCGLSIGLAYGLTYCYSIDLSERVALKLDQTFPFSLMRRISVFKYVSGSSAERRAAQSRKLNPVPGSYPTQSCHPHLSPSHPVSQTQHASGQKLASWPSCTPGHMPTLPPYQPASGLCYVQNHFGPNPTSSSVYPASAGTSLGIQPPTPVNSPGTVYSGALGTPGAAGSKESSRVPMP

SEQ ID NO: 2816 - protein, 449 aa, Homo sapiens
  MISC_FEATURE (427): Xaa equals any of the twenty naturally occurring L-amino acids
  MISC_FEATURE (436): Xaa equals any of the twenty naturally occurring L-amino acids
MSEMDRRNDAWLPGEATRGVLRAVATQQRGAVFVDKENLTMPGLRFDNIQGDAVKDLMLRFLGEKAAAKRQVLNADSVEQSFVGLKQLISCRNWRAAVDLCGRLLTAHGQGYGKSGLLTSHTTDSLQLWFVRLALLVKLGLFQNAEMEFEPFGNLDQPDLYYEYYPHVYPGRRGSMVPFSMRILHAELQQYLGNPQESLDRLHKVKTVCSKILANLEQGLAEDGGMSSVTQEGRQASIRLWRSRLGRVMYSMANCLLLMKDYVLAVEAYHSVIKYYPEQEPQLLSGIGRISLQIGDIKTAEKYFQDVEKVTQKLDGLQGKIMVLMNSAFLHLGQNNFAEAHRFFTEILRMDPRNAVANNNAAVCLLYLGKLKDSLRQLEAMVQQDPRHYLHESVLFNLTTMYELESYGACRRNRPCWKLSPARRGTXSTHSALSWXNLLQHTTSEGPGL

SEQ ID NO: 2817 - protein, 133 aa, Homo sapiens [sequence omitted]

SEQ ID NO: 2818 - protein, 112 aa, Homo sapiens
  MISC_FEATURE (30): Xaa equals any of the twenty naturally occurring L-amino acids
  MISC_FEATURE (34): Xaa equals any of the twenty naturally occurring L-amino acids
  MISC_FEATURE (108): Xaa equals any of the twenty naturally occurring L-amino acids
MDKFNVTKPIHALNNPIISQFFPTLLLWSXSALXPSIVYYSTLLESHWTKSGENQIMMTKVYIFLIFMVLILPSLGLTSLDFFFRWLFDKTSSEASIRFGVRLPCLTXVPSL

SEQ ID NO: 2819 - protein, 218 aa, Homo sapiens
  MISC_FEATURE (152): Xaa equals any of the twenty naturally occurring L-amino acids
  MISC_FEATURE (153): Xaa equals any of the twenty naturally occurring L-amino acids
  MISC_FEATURE (163): Xaa equals any of the twenty naturally occurring L-amino acids
MFIGAFLIPAMVCGTAFFINFIAIYYHASRAIPFGTMVAVCCICFFVILPLNLVGTILGRNLSGQPNFPCRVNAVPRPIPEKKWFMEPAVIVCLGGILPFGSIFIEMYFIFTSFWAYKIYYVYGFMMLVLVILCIVTVCVTIVCTYFLLNAXXITGVPFIQKXIYLLSPSRHQAMDKFSLCCINCNLCLHVFLLLLFFQNKDVWLISNIILLWIYGGI

SEQ ID NO: 2820 - protein, 238 aa, Homo sapiens
MLGSPCLLWLLAVTFLVPRAQPLAPQDFEEEEADETETAWPPLPAVPCDYDHCRHLQVPCKELQRVGPAACLCPGLSSPAQPPDPPRMGEVRIAAEEGRAVVHWCAPFSPVLHYWLLLWDGSEAAQKGPPLNATVRRAELKGLKPGGIYVVCVVAANEAGASRVPQAGGEGLEGADIPAFGPCSRLAVPPNPRTLVHAAVGVGTALALLSCAALVWHFCLRDRWGCPRRAAARAAGAL

SEQ ID NO: 2821 - DNA, 126 bp, Homo sapiens
gtgccaccatgtccggctaatttttgtatttttagtagagacagggtttcaccatgttggccaggctggtcttgaactcctgacctcatgatccacctgcctcagcctcccaaagtgctgggatta

SEQ ID NO: 2822 - DNA, 6143 bp, Homo sapiens
gagacagggtttcaccatgttggccaggctggtcttgcactcctgacctcgtgatccgcccgcctcagcctcgcacagtgctgggattacagatgtgagccaccgtgcccggcgcaaatgcatttattgcatacaggacggtgcacctggactgtgctggccgaatgcttctgacactggagaagcggaaaccaaagcccaccttcgttcactcctgtctccagttaccctcagatagacgtttgggagggttctcaggcgagtagatgtaggaagtgtgatgtgctgttgtgttgtggcgacgacactgtggactaggggcatggtttgtgcttggtgtgaagcctcttcttccttcccaggaccctgatgccccacaaccctgcggcaccacagagccgaccacaagctccagtctgtgtgggatcgatcatgaggcgctcaacaagcagattatggagtacaaaaggaggaaagataaagggctcgggggcctggtgtggcaggggcaggtggctgagctgacaacgcagatgaaaaagggaaggaagagggccaagccccgcctggagcaggacagctccctcaagagttacctgtcaggcgaggaggttgaagatgacctggacctggttggtgccccggagtacgaatgctatgccccggacacagaggagttggaggcagagagaggaggtggcagaacagaggatggccacagctgcggagcaagcagggagtagatggagaggctctgcccatcccacatttgcagggaaaagcattggcacgcaacgcagcatgtggcttcattgaggcagttgatggagttaaaccatctgctcttctgctacttcaacattttctagcttttccgtgtatctaaacacaatttgctacacaagtcactgtttttttttccatgcactgtgtgtaatttaaaaattaaatggccatcttatcacagattctcacaaaaagaaaatggtaaaatagtgtctctgagatgctggcatggccacctccacctgcagagccctgccaggtgccagtgagtgcttggcccgaggggtcaggccacagcagtggccggggtaagaactgaacctgcaaaccatggggagatcacgagggtcccacagagcctccacaaccaccctggagtctgggctccgtccctaggggctgtctgggcatggcacagtggcgcacgggggctccattccctggggctgctgggtcggcacgtggcgccgggggctccgtccctgactggcctcttcacagctttgtgcagcaggctccaccttctggttcaggccagttgggcagaaagtgagttgggtatgctggggcttcctgggcgaccccggctctgaccgtggttccatcacgcctgaagtagtaacacttttcccttggtgcccgtggccagctagtgtattttctaatccatccaaaggtgaaacagacttggtctttgccttctgaagagtgtgcgactctgagtcatactgaattctttgtgtcacctccgacgcaaagattcgttttgctgtttatcagaagagaaaacacagattccataccttgtcagctcctatttagttcggcttccctcttaatgtcccagcccctgtgagctgtcaggttctaaattcagaattctctcaattctgtcaggttctgcactacgagtcagtgtcatccctccaagccctggctctctgccagtgcagcagggctgtgagaatcaagacggcacagggaaggcatctgtcccagcatttgcacatgacaggtgcccacggtgcaggagtagaatctgtggaagcagcagtggctttagttgctgtgccctgccacctcctccccaaaaaggagaagtgtccaagggatagcagacccgtagcactgagcggcctgccgtgctgaccactggatccaggccacgtgctgcagacagcggctgtgggcgagtgatgaggccactacccagaaagctgcatgtgcactgtgtggggtaaggacagtaggagatgctgctgcaagatgctgactcccttgtttttcttttcatttgtgctctgggactaagctgtgtataagtcatcaaatggcagaagcaagatttttcttttgagatctaggaaattatttgtttatactctacactcttatttcctatatcaggatggggaggccactacctcaggccagttaaactaagaagaaagaatttaaggcaatttgtaaggatagacaaaaccccacatgatggtatgagtaggagagagaaaaaaaaaagggagccagaaattaggttacaaagtgtacaccacacataaaggctgatgcctctgttacaccgtgagccaaatgtttatctctagggtttctggtagccagttgcggggtgtccagtgaaggggtgtacatgtctgtggttaatcatataggtcaggataatgaggtgatactgcagtgacaaatggcaaatctccctggcttacaacaaccagtttgcctcttattcttctaggggaccatcatgggctgaggtcaggccaaggccttttgtatctggtgttactggaacatggctatgtgaattcatttatgtacaagagacctccccatcctgatgtaggaaatgaatggtgatgatttacgagcgcaacatcctaaaaaacgtttttgtatttccctagcaagataacttcaggttacaaggctctggtacttgaccatgatgactccatgagaaaacagcagaacgccagctttgcaggtacctccacagcactgccgggctgggaacagggccagtgcttgcaccagcgctggagggggccacagcagagtaaagacagagtctgccatgcaggagtgcttcgcaggtcaggcactgctctgagtgctttgtgttaacctgccccccgccccctaacttgggaaaggtgttaaagaaggagagaacgccctcaatggtgtgtcctttgcatacacacctttgcatgcatctgatgtgcccaggctgtgttttattgttctagcaatttattgttacaaaacagattgctgccatcaatttgtctcaggtccttctagcacatctgacagggactagtgtctagagccatgaggacagagaccagaagggacaagaaggagtgggcagagggaatggaaggtagagttaggcccagagagccccaggctgctgcccagacctccacgcctgtgccggatgtggtgttggcatccatagcagtctcgcaaagttgttctcattttccaaataaggaatctgaggcccagggagaggtgaagtgctgcaggagatccaaccaggcgccggctcagtgcctcctagaaagaggagtgtgggcacgtttgcaggggatccaaccaggcgtcagctcagtgcctcctagaaagtggagtgtgggcatgtttgcaggggatccaaccaggcgtcggctcagtgcctcctagaaagtggagtgtgggcacgtttgcaggggatccaaccaggcgtctgctcagtgcctcctagaaagtggagtgtgggcacgtttgtaggggatcccaccaggcatcagctcagtgcctcctagaaagaggagtgtgggcacgtttcagagaaaactggcttaggcctccctgtttctggcgtggccttccctgggagcgagttagggacacggaagctcacccgcttctgaatgggtccactcctggggatttccgcggccttccctgggagcgggttagggacacggaagctcacccccttctgaatgggtccactcctggggatttccgcggccttccctgggagcgggttagggacatggaagctcaccctcttctgaatgggtccactcctggggatttccacggcctttcctgggagcaggttagggacatggaagctcacgcccttctgaatgggtccactcccggggatttccatggccttccctggatgatccactcctggggattttccgcagctctccagatgacgtgcacgcacactaaacacccagaagttagggaggcactgatccagtgaagtcctcagatcaaccttgtgagctttttacaagtacctgtcactgttaaactgctgatgaaatgtgaaacgacttcacaggttttcagtctgataagctctcctgtgtcactgtcccttaccttgttagtaaaggtcaatggttctcaaagttccgggcacatcccctgggggctcataaaaccagactgtcggccacttcagccttctggttcgctgttccttggtaatgcagatggcccagtaagcaactctacaaacattagaacattttgaggtagacaggggaacttaatcaccccttgtaggcccccagaagactggacccaacatccagcacaatgcctctcagccttggctgtgcatctgaaacacctgctgtttgaagacacctgggcctggagacgggccagagccaccttggtggtctgagtatgaggccagcattagaacctctgctctacgggtgactgccctgggttgatttttttccagtattatctttagtacagaatcttttcctctctaagggcctgagaccctctcttaggaatagaagtacagttttcttccccactccttttgtccagaaggaaaacctggttttacatcagaaacttgaggtactttgaaaatttgccagctgccttgaaggagagagggcttgagtgtattttgggggaagaatgaggggacaacagggcagggagaagggacagagctagaggaaggacaggcctgtgccacccaggccagggtaaggggagcagagaccttttggttcctggtttgtgacacaggaagggagggaactggggaggacaggtcatgatcagtgtttcctgattaaaaattttttatttttatttttaattatcatgggcacagagtaggtgtatatatttgtggggtacatgagatgttttgatacagacatgcaatgtgaaaaagcacatcatggagactggggcacccatcccctcaagcatttatcctttgtgccacaaacaatccgattatattgttttagttatttttaaatatgcaattaaattgttattgactatagtcacccttctgtgctgctgctctactgtggcctcaaagatcataaatgctgtgggtgctggcaagatactgaaataaattaattctgtatttctaaaaataatttcatactttctttttacagaaggaatatatattctttgttgaaaaatgttaaaacagataccaatagaatagaggaaacaaaagccccatgtagtctcagctaccagagacaccactgttaaattttggtgtagcatcaggtgcggtggcacgtgctgttagtactcaggagactgaggcaggaggatcactggagtctgggagtttgaggctgcaagcacattgattgcacctgtgaatagtcactgcactccatcctgggcgacagagtgaggccctgtctcaaaaaaaagatggtaacatcagaatgttaaccgagcatgaggtccccatgcccacatgggcagcacacctgggaagccagccctgatgtcagttaatcctcaggcctctttgaggtgtgccatttgccctagggatgtcctgtatggcaaagggcctgttccagaggcacttgttatgtttacctgtcaccctcaatcccatgccctcgagtagctcttgggcttccttgagccttcgtggccctaattttgaggagtgcagccgttattttgtggagtgttcctcagtttgggcttgtctggtgtttcctcatgatcacatttagtacttgcttttttgcagggacatcacagcagtgatgctgtgctgtcagtgttgggttgtatgttcctggtgatgtccacaatgatgagctgaagaaaggggtgtctgttgggcttctccctgtgaacttactcttaagtatttactttttgaaacaaatgaaaacagagacacaagacaccaaaacctctgggatacgataaaagcagtgctaaaacggaagcttataccattaaatgcctacttcaaacatacaaaagatcacaaattaacaacctaa

SEQ ID NO: 2823 - DNA, 125 bp, Homo sapiens
ctctgcatgctttatggccttggctctgggccaaggtgtgtgatctcctgcattcatggtgtgtggtgtgaggagggggatgggtccctgccccgtctgcacgtggccctcatgattcccgcgct

SEQ ID NO: 2824 - DNA, 6238 bp, Homo sapiens
gggcctcatgcatctgcaggggaagccagtttgttcttttgatccagaagggttaattttcgctgcaggtgtcaactctgaaatggtcaagctttatgaccttcgttcttttgataaggtaaatctttgaatctttgagatctttgagctgttttttgttttgttttgtttttgagacagagttttgctcttattgcccaggctggagtgcagtggtgtaatctcagctcactgcaacctctgcctcccaggttcaagtgattctcctgcctcagcctcccaagtagctgggattacacgtgtccgccaccacgcctggctaattttttgtatttagtagagatgggtttcaccatgttggtcaggctggtctcaaactcctcacctctggtgatccacccacctcggcctcccaaagtgctgggattacaggcgtgagccaccgcgcccggccctgtaagagccttttctacaaaaggaaaaatgtggtagatattagagagtggcagagaagtagctcattctctgctttccttagtcaaaaagtaatctaaaggaataggatgggaattggctctagcagaagaaattattaatatgcctggggctactgttttttatcttttgcaggggccatttgctacctttaagatgcagtatgatcgaacttgtgagtggacaggacttaaattcagcaatgatggcaagctcatcctcatttccaccaacggcagcttcattcgtctgattgatgcattcaaaggagtggtgatgcacacatttggggtgagctgacagccttcaagcatggctgtttccatgctcatacttcctatgctaagaattatgttagctggttggtggagaccaacagttactcttgacttactcatgaaggcatgcacttgtattttcttcctgctcatgaacttacctctcttggatttcgtagatgttcatttctcaccaagtgacccaagtttggtatttagatataaaataatttcctaacaataaagttttcttgcccccttgagtatgccttgaatacagagttgagggtgggagtggattgtcaacgatggcaaccacatttggaagcttggtggtgtagtacatgacaaggaaagggtttcatggaaaggaaggtgatgcatgtgctgagtcagtgtttgtaggcagctgtttttattaatggctctgtaagaacaaaagaactgctctgttttgttttagggttatgccaacagcaaagctgtcacactggaggcttcatttactccagactctcagtttattatgattggtgagtttccttttatcccctgtgggggttatttctctggtactatgcatttctttgtttaaattattaactgagacattattatctatttgatagatgttcttagatttctgtatagcacattatgccaaggacatagtgtcttttaactgccctgactggaccaaaatttgagttaaactccacaagcactaccttattagtaatgctaatgtcctggtgtaacccctacattcagtcatcttagtggctgcctgttggtagggtaatggtattcggccccttttttagatgagaaaactgaagttagaacggaagtgacatgcctgtgaacaaatagctagggtcaagataaatttccaaagtgtccttccttcactgcctctcctccctctcaattttgcctgagggatgggtcctaaagcttggcgtatcctcagatctcaatccatgtctcatttccagttgtctttgtattgcgccttgagctgttacattttccgtgaatatcctctttaggttcagaggatggcaagatccatgtctggaatggagagagcggtataaaagtagctgtgttggatggtaaacacacaggcccgattacctgtttgcaattcaaccccaagttcatgacttttgccagtgcgtgttccaacatggtatgtgaacagtaagaggtatctgctactcagggacccttcccagttggggtggtgggtgcctcaacaagcacagcaagctgtgttctacataggtacattacaagcatccaagtacatgtttctcaactggtggtttccctatttcatctcctattatttgatctctggctgggctggtcttgcctttcatttttattcttcctagaggtgatcaggaatcatctttgagttccaaggagatcataggccagtttttgctctggaccctaattttaggtccaaactacctgggctatgcttggcaatttttttgctccttaaaatactctgaaccggccttttgtggtttcagttttccattcctgttggtttacgccaaattcccagaaatttctacagttggtcataactcaccacttagaattaactccaggcccttatctcttcctagataatactaacagaacaaaggatcagtgagtctcagctccagttttcccttgtgatctcctaaacctgcctgggtattcggggatgagacatttcattactagcctacccggagcacattgccaccttgctttttttttttaaccaagaaaaaaatgttagaaaaaatacagcaaaaccatccagttccttactttttacagcccaggaaggtgggggcctgttggaggtaacctggtggattagcaatgaggacaggttacttattcacccacctcccaggcagcactcctttttttcccttcctttaaaaaaaagggggcggggggtctgctttggtggaaggtggacagtgattattggagaaaaacagaaccattttactttcacatagaggaaagagtgtttctgtctccttagagcatcggggttggttggttaggagagagggctaccagagccactggggttgggcacatttttgctgtggggtgggatgtgaagaaccgttggcagtgaggagatgcttggctttttaaagttgatttatgttctccttctaggccttttggttgcccaccattgatgactgaccctgttgctgcttggctatttctgtatagtgagggcggccagcaggaagaaactcagagggaactgagataatagtgggattggatcatttgactgggctggagaacatccttttacatggccttcccatggatgtgctgtacatctgctcaaaagaaaataattactttgatgagcgtcttcaaaaggactcttggtgcaacagactcaattggaactcagcttttctaactgtcactgcaccaagctctgctggaggagtgaccagactcacgatttggtatagtggggctctcaagcatcttcaatttgaatgtacatgctgctgaggagccggtgaagtcatcagttccgcacatcccttctaccctccaactgcatgggaagccaaagtcctggttttgaaatgcttgggcagctcagccgcttgccctcaccctgcatgtcttgttactgggtctccctgtgtacttgtggcattatccacaaccatcatgtttcttaggtgccaaacatttacagaaacattttcatatatcttggggtcagagaaagggacagatacagaaggaccttgcttgcaggaagccatgcagttagtttctgcagttagtcgtgtgaggctaggtggttgggcaggcctcgggctgtaggtgttgggtgggaaaaagacccaagggcctgaaagggagggaaaggggagggtagcgggagggtagcaggtgagttcctagggctggaaggtttagcagcagcctggtgcagtgccctgtcatcaagacaaacccacggtcctcctgggtgcctaccaagcttggtttgtacaaaagcaaggtgggagtctatttttgtacatgagatacatcacacttacctgtgggccagtattgtgaagtgagtctgagttgtttacactgatgccttccctgcccaccacaaattgtgtacatagtcttcagatgataccacccctttccccagctcccaaccaagagctggttctaggcctgtgttatatgtcatatttagcgtttttatatatgacctttgatttctgttgtttgtattttagcacagtgtatgcaccttcatttaaatacatctgtgtgcatacagatacgcatatatgtgtgtgcgtatgcatatatctctcatctgtagtttccaagagttcagctgaagcagatggagtcctgcagcccaggagacaccctgcatccctgctaatagtgtttgccacaagtattagtgagtcttccttattaatattttcatttcagaagactgaagcaaagctgatagtgtttgctgtttctttggcagctaagtgagggtcttgggatgacttgctgtgttcctcaagctgcactttggggccatctctgcagtattagccccctttttgcttggtggtactctgtctgtgcctgtgtgtgtgtgtgatagtcactcttgcatggcttccatgtctggtttgtggcatttggggataaggtgctgaagccagagcatttgcagtttgtttgaggcctcgttgccaatgatagatcactcctgttgacctggtatgtctgcttgcttgctgcttttccttgctttctcttggaagaggaaaggactctggtcaggcccaggctgagtgagatgagctgcagctggctcatggccttcttagagcagagagaggagtatgtcattttactaagttcctaaacaaacatttatgcaggcaacactccttgcagatccagaaactgaggcacaatagggttatgacttgctcaagaatatgtagctgctagggggtaaatcaaggcatcacaatttctgttcagcgggcaggaataggctgtgaattgctagcactttttttttttaagcaattactttttgacttgttcctctgaaagtgcaagaggcgtacacctttcccaaatgtagactagaatctgcaggatgccacccactgtatagttctgctttcccagagaggaagaacttttagaaaccaaatgatcttaattgttattgcccaccccctggcttttccgggtagaaaattcacagtaggaatgattgttaagagagagtgcttggaaccatgggttaacaggaaaggctacctaacttcacatatctgcaaccagagcagccaccaagcattacttagcagcaggaaaatgattgtatttgagttcctgtgtgtccaaaactgagcaccatgttctttgaaaacatgccacctcaaggctgggcgcggtggctcacacctgtaatcccagcactttgggaggccgaggcgggcggatcaccggaggtcgggagtttgagaccagcctgaccaacatggagaaaccccatctctactaaaaatacaaaattagccgggcgtggtggcatgcgcctataatctcagctacttgggaggctgaggcaggagaattgcttgaacccaggaggcggaggttgcggtgagttgagatcgtgccattgcactccggcctgggcaacaacagcaaaactccgtctcaaaaaaaaaaaaaaaaaaatgccacctcacagtctctatcgttgggccctgtggttgcaaagctgcctcctgaattaagaaggaaagggaaaagatatagctggaagcgagtggaagagatgctgagggctggggctgcacagacgtgctcagcagggctacaggtgctcaagccctattggggatgggtggggagtggggcagcggcgtttgccaccttaagaattggggccaaagccactgatgtttatttgacagtgacactgcactgggtacttaaagaaattatttcccgttgtaattataattactgcttattaaggaaaatatgggaattttagaaagaatcaagtttgccacccaaatgctaccactgttaatcttttggtgttaaatgttccccctagacatttctgtgcatagatttttggtgtgtttacatagtcgttattctgtatatacaattttatgtcccttttgtacttaacgtataaacattttttccatgttacagtcttaaacagaattttatggctgcagcctcttcgatttgagtttctgtagcatggtttgcctggttcccagagctggagggaggcttgggttgtctcctgttagttctggctcacactgcagcttgctgtaatgctgtgtagacggattgctgggctccctgggactgcctctgactgc

SEQ ID NO: 2825 - DNA, 5879 bp, Homo sapiens
gggcctcatgcatctgcaggggaagccagtttgttcttttgatccagaagggttaattttcgctgcaggtgtcaactctgaaatggtcaagctttatgaccttcgttcttttgataaggtaaatctttgaatctttgagatctttgagctgttttttgttttgttttgtttttgagacagagttttgctcttattgcccaggctggagtgcagtggtgtaatctcagctcactgcaacctctgcctcccaggttcaagtgattctcctgcctcagcctcccaagtagctgggattacacgtgtccgccaccacgcctggctaattttttgtatttagtagagatgggtttcaccatgttggtcaggctggtctcaaactcctcacctctggtgatccacccacctcggcctcccaaagtgctgggattacaggcgtgagccaccgcgcccggccctgtaagagccttttctacaaaaggaaaaatgtggtagatattagagagtggcagagaagtagctcattctctgctttccttagtcaaaaagtaatctaaaggaataggatgggaattggctctagcagaagaaattattaatatgcctggggctactgttttttatcttttgcaggggccatttgctacctttaagatgcagtatgatcgaacttgtgagtggacaggacttaaattcagcaatgatggcaagctcatcctcatttccaccaacggcagcttcattcgtctgattgatgcattcaaaggagtggtgatgcacacatttggggtgagctgacagccttcaagcatggctgtttccatgctcatacttcctatgctaagaattatgttagctggttggtggagaccaacagttactcttgacttactcatgaaggcatgcacttgtattttcttcctgctcatgaacttacctctcttggatttcgtagatgttcatttctcaccaagtgacccaagtttggtatttagatataaaataatttcctaacaataaagttttcttgcccccttgagtatgccttgaatacagagttgagggtgggagtggattgtcaacgatggcaaccacatttggaagcttggtggtgtagtacatgacaaggaaagggtttcatggaaaggaaggtgatgcatgtgctgagtcagtgtttgtaggcagctgtttttattaatggctctgtaagaacaaaagaactgctctgttttgttttagggttatgccaacagcaaagctgtcacactggaggcttcatttactccagactctcagtttattatgattggtgagtttccttttatcccctgtgggggttatttctctggtactatgcatttctttgtttaaattattaactgagacattattatctatttgatagatgttcttagatttctgtatagcacattatgccaaggacatagtgtcttttaactgccctgactggaccaaaatttgagttaaactccacaagcactaccttattagtaatgctaatgtcctggtgtaaccctacattcagtcatcttagtggctgcctgttggtagggtaatggtattcggccccttttttagatgagaaaactgaagttagaacggaagtgacatgcctgtgaacaaatagctagggtcaagataaatttccaaagtgtccttccttcactgcctctcctccctctcaattttgcctgagggatgggtcctaaagcttggcgtatcctcagatctcaatccatgtctcatttccagttgtctttgtattgcgccttgagctgttacattttccgtgaatatcctctttaggttcagaggatggcaagatccatgtctggaatggagagagcggtataaaagtagctgtgttggatggtaaacacacaggcccgattacctgtttgcaattcaaccccaagttcatgacttttgccagtgcgtgttccaacatggtatgtgaacagtaagaggtatctgctactcagggacccttcccagttggggtggtgggtgcctcaacaagcacagcaagctgtgttctacataggtacattacaagcatccaagtacatgtttctcaactggtggtttccctatttcatctcctattatttgatctctggctgggctggtcttgcctttcatttttattcttcctagaggtgatcaggaatcatctttgagttccaaggagatcataggccagtttttgctctggaccctaattttaggtccaaactacctgggctatgcttggcaatttttttgctccttaaaatactctgaaccggccttttgtggtttcagttttccattcctgttggtttacgccaaattcccagaaatttctacagttggtcataactcaccacttagaattaactccaggcccttatctcttcctagataatactaacagaacaaaggatcagtgagtctcagctccagttttcccttgtgatctcctaaacctgcctgggtattcggggatgagacatttcattactagcctacccggagcacattgccaccttgctttttttttttaaccaagaaaaaaatgttagaaaaaatacagcaaaaccatccagttccttactttttacagcccaggaaggtgggggcctgttggaggtaacctggtggattagcaatgaggacaggttacttattcacccacctcccaggcagcactcctttttttcccttcctttaaaaaaaagggggcggggggtctgctttggtggaaggtggacagtgattattggagaaaaacagaaccattttactttcacatagaggaaagagtgtttctgtctccttagagcatcggggttggttggttaggagagagggctaccagagccactggggttgggcacatttttgctgtggggtgggatgtgaagaaccgttggcagtgaggagatgcttggctttttaaagttgatttatgttctccttctaggccttttggttgcccaccattgatgactgaccctgttgctgcttggctatttctgtatagtgagggcggccagcaggaagaaactcagagggaactgagataatagtgggattggatcatttgactgggctggagaacatccttttacatggccttcccatggatgtgctgtacatctgctcaaaagaaaataattactttgatgagcgtcttcaaaaggactcttggtgcaacagactcaattggaactcagcttttctaactgtcactgcaccaagctctgctggaggagtgaccagactcacgatttggtatagtggggctctcaagcatcttcaatttgaatgtacatgctgctgaggagccggtgaagtcatcagttccgcacatcccttctaccctccaactgcatgggaagccaaagtcctggttttgaaatgcttgggcagctcagccgcttgccctcaccctgcatgtcttgttactgggtctccctgtgtacttgtggcattatccacaaccatcatgtttcttaggtgccaaacatttacagaaacattttcatatatcttggggtcagagaaagggacagatacagaaggaccttgcttgcaggaagccatgcagttagtttctgcagttagtcgtgtgaggctaggtggttgggcaggcctcgggctgtaggtgttgggtgggaaaaagacccaagggcctgaaagggagggaaaggggagggtagcgggagggtagcaggtgagttcctagggctggaaggtttagcagcagcctggtgcagtgccctgtcatcaagacaaacccacggtcctcctgggtgcctaccaagcttggtttgtacaaaagcaaggtgggagtctatttttgtacatgagatacatcacacttacctgtgggccagtattgtgaagtgagtctgagttgtttacactgatgccttccctgcccaccacaaattgtgtacatagtcttcagatgataccacccctttccccagctcccaaccaagagctggttctaggcctgtgttatatgtcatatttagcgtttttatatatgacctttgatttctgttgtttgtattttagcacagtgtatgcaccttcatttaaatacatctgtgtgcatacagatacgcatatatgtgtgtgcgtatgcatatatctctcatctgtagtttccaagagttcagctgaagcagatggagtcctgcagcccaggagacaccctgcatccctgctaatagtgtttgccacaagtattagtgagtcttccttattaatattttcatttcagaagactgaagcaaagctgatagtgtttgctgtttctttggcagctaagtgagggtcttgggatgacttgctgtgttcctcaagctgcactttggggccatctctgcagtattagccccctttttgcttggtggtactctgtctgtgcctgtgtgtgtgtgtgatagtcactcttgcatggcttccatgtctggtttgtggcatttggggataaggtgctgaagccagagcatttgcagtttgtttgaggcctcgttgccaatgatagatcactcctgttgacctggtatgtctgcttgcttgctgcttttccttgctttctcttggaagaggaaaggactctggtcaggcccaggctgagtgagatgagctgcagctggctcatggccttcttagagcagagagaggagtatgtcattttactaagttcctaaacaaacatttatgcaggcaacactccttgcagatccagaaactgaggcacaatagggttatgacttgctcaagaatatgaagctgctagggggtaaatcaaggcatcacaatttctgttcagcgggcaggaataggctgtgaattgctagcactttttttttttaagcaattactttttgacttgttcctctgaaagtgcaagaggcgtacacctttcccaaatgtagactagaatctgcaggatgccacccactgtatagttctgctttcccagagaggaagaacttttagaaaccaaatgatcttaattgttattgcccacccctggcttttccgggtagaaaattcacagtaggaatgattgttaagagagagtgcttggaaccatgggttaacaggaaaggctacctaacttcacatatctgcaaccagagcagccaccaagcattacttagcagcaggaaaatgattgtatttgagttcctgtgtgtccaaaactgaggcaccatgttctttgaaaacatgccacctcaaggctgggcgcggtggctcacacctgtaatcccagcactttgggaggccgaggcgggcggatcaccggaggtcgggagtttgagaccagcctgaccaacatggagaaaccccatctctactaaaaatacaaaattagccgggcgtggtggcatgcgcctataatctcagctacttgggaggctgaggcaggagaattgcttgaacccaggaggcggaggttgcggtgagttgagatcgtgccattgcactccggcctgggcaacaacagcaaaactccgtctcaaaaaaaaaaaaaaaaaaatgccacctcacagtctctatcgttgggccctgtggttgcaaagctgcctcctgaattaagaaggaaagggaaaagatatagctggaagcgagtggaagagattctgagggctggggctgcacagacgtgctcagcagggctacaggtgctcaagccctattggggatgggtggggatttgggcagcggctttttccaccttaagaattgggggcaaagccactgatgtttatttgacagttacactgcactggggacttaaagaattatttcccgtggtaattagattactgccttttaagggaaatatgggtatt

SEQ ID NO: 2826 - DNA, 105 bp, Homo sapiens
gagacagggtttcgctcttgttgcccaggctggagtgcaatggtgcaatctcagctcaccgcaacctccacctccagggttcaagcgattcttctgcctcagcct

SEQ ID NO: 2827 - DNA, 5781 bp, Homo sapiens
gtggaggcctgctgaggcagtggttgtggggatcggtctccaggcagcagggggcagcagggtcaaggagaggctaactggccacgggtggggccagcaggcgggcagaaggaggctttaaagcgcctaccctgcctgcaggtgagcagtggtgtgtgagagccaggcgtccctctgcctgcccactcagtggcaacacccgggagctgttttgtcctttgtggagcctcagcagttccctctttcagaactcactgccaagagccctgaacaggtaatgggatagggatacagattatcctgtgaagtgatatcgatctggaaacaggtctggggagctggaggggctctagtgagggttctgggagggtctggggttagtgtgggggggagcacaggatatacaggtgctaggaaagagcatggagtgacctgcagtgtgggagtcaggctgggtgtgcaggtggaggaacctggggtgttaggatctcagagtgtcaggtgctggtggaggtcctgggtagtatagaggggtaagggtgttaggatagaaactgggaaaaggtctgtgtcagaccaggtacaggagaagcttggtgagatatgggttcaggatcctggggtctggcatatctggctgaatatctgaagccagggccagcccaggtgggcccaggggaaacaaggccctaacttgcacatgtctacctcccaggagccaccatgcagtgcttcagcttcattaagaccatgatgatcctcttcaatttgctcatctttgtaagtacggacattgtggactctttggggctccctataggagcaggtcacaagctgagtagagactaagctggggaatgggagactgctatgcccaggcttcgtcctgcatgtgtccccttatgagtgggatgcaaaggtctccccaaatgctgctgattcctagtcccagcagcagccaggctgccatacaggtgcgtgtgtgaaaaaggggatggagaagctaggggcaccccctctctcctacaaagctttagcctaggcttcaggcagggcagagtaagctaccaggaatgattctccaccctttataggcactgggggcccagaaaatagaagggctccacccaagtttacctaccacagaaggaaattcagtacagaggaaattcttctgtatgacggggagctgaaaggagggagggcctacctctcatcagagcaacagtccttattcattcgacaaacattcattgtctaggataccatgatgggtgctggggtggcaggtaagcaaagcctttctctgccctgaaggatctcagctccgataagccagataggcagataataacaacacagtgtgtttgggcttaggacggaggttatgggagcctgaactcagcctggttggagaatacttcctggaggaaatagctgaagctgggaaattgcacttggtgggggagttataaagcatgcataaagggccagaagtagtgaaacttgatatcgttcagaaaaccagaaacagattgcatagggcatgtttgagaagctgagccatgaggcgtaaatcctggagatggtggtggagatagggagaaacggacaaagtggacaaaggacaaagctctaggatgatggctgaggggtagaagaaggggcaagggagacagaggtcttggagatgacgcccatatctctggcatgagcaacccagatggcagggggtggggcctggtttgtgggaaggggtgtcccactagcagatgtgtacccagtggaggtgcagctcagattggagctggccatgggtatttgaaaatcatgtgcgcacaggtagccactgaagccatgggagtggatgagaacacttggaaagtgaactctgggaaacccaatttattagggataagcaaaaaaaaaaaaagccactgtgaaggagatggagaaggagcagtgggagggggagaggaaaacaaggagagtagtacactaaccacattagagtaggttagtgtaagtgaaagtgaggaagtgggccaggtgcagtagctcacaactgtaatcccagcactctgggaagctgaggcgggcagattagttgagctcaggagttcgagaccagcctggccaatatggtgaaaccccgtctctactaaaaatacaaaaattagctggatgtggtggcgcatgcctgtaatcccagctacttgggaggctgaggaaggacaatcacttgaacccaggaggcggaggttgcagtgagccaagatcacaccactgcactccagcctgggcgacagagtttatgtatgtattgattagtttagaagcgtgggtagactctctagttctgatgtggtctgtgccttgggcttccttcggctgcagggaacttgtgtttttgttgttgttgttgttgttgtttgtttctttgagacaggatcttgctttgtcaccaaagctggagtgcagtggcatgatcatggcttactgcagcgtcaacctcctgggctcaagggattcccctacctcactcagcctcctgagtatctaggactacaggagtgtgccaccatgctcagctaattaaaaaaaattttttttgtagaggcggtctcactatattgcccaggctggtctcgaactcctggacttaagtgattctcccacctctgcctcccaaagtgcggggattacaggcatgagccactgtgccagtcctgaactagtctttatccctgtatctggaggaagcaataggattccagggatttggacaggagaggctctgccctgagagggttaaaggcaaatccggtttgatttctggcctctgttacccagaccttgccaggctgggcaaagcaggatagggcagacctccagctccatgaaatttgaccctgcaggctagaagtccagctttctgtccttgggcaaacatgcctggaatccagccacaatctgccacctcacttcccgttctagcctcagtttttatagctggcaagtgaggactagtcaccaaggtggtgtcaggctgattcatccactgaagccctgggccgggaggctttcctctaagatctgtgggaactgcgcagggccctcctcaatctaggcctcagaattccccctgaggtttggagttgagctagacagcctttaagagaagctctggctgtattcccactggtacctcactttcctcttgtgaggcaaggaggtcttgtctacatgaggggcgggcctgaagttggattctggaggggagccaaatggggcctcaggtgggtgaaccttctcaacctcctccctctccaaggttgccagcaggtggaacctcagcctcgcctccattactatggtgactattgagcctgttctgctaccacccccgtctccacctatcagaggacagaggtgttctaggcacccatagcccagaaaggaaataggaggctgggccctcacctgcctgttttcaatcctagctatgtggcaggaccctggcagcagtgagggaaagtcttgcccctctgcccaccctgaggatatttctagaacccctgatctcctttatatctgcccaggtgtgcagcctggtcctagctatgcatatcccagctcccatttttctggctctagaggatgtttccctccttacaggatgaggttttagactccctagccaataaagagggaagtttctcggctcccatccttcttactcagctgtgtggtagtaagctacttgccagcactgtttaaggcctgcctgacctctctctccccagctgtgtggtgcagccctgttggcagtgggcatctgggtgtcaatcgatggggcatcctttctgaagatcttcgggccactgtcgtccagtgccatgcagtttgtcaacgtgggctacttcctcatcgcagccggcgttgtggtctttgctcttggtttcctgggctgctatggtgctaagactgagagcaagtgtgccctcgtgacggtgtgtgaaacccagctccacaggctgatgaccaagagtcccctcgcccttgacaccaggccctgggattcccaaaccctgctttggacccccctaggctcaggcttctgtctcacttttccgggggggggattagggcaaggagggcatgagggactgtctctccctaaaacccagacccctgttccccactcagttcttcttcatcctcctcctcatcttcattgctgaggttgcagctgctgtggtcgccttggtgtacaccacaatggtgagacactgggatggaggaagggaagaagattgggcaaaaccctgggagtgggctgtggcctgtgaatggccaccttctgtaccagcccctaaacactggcctgcctcacccaggctgagcacttcctgacgttgctggtagtgcctgccatcaagaaagattatggttcccaggaagacttcactcaagtgtggaacaccaccatgaaaggggtaaggttggctgggggaggttttagggtggagagaaagaagcaaggccccacctccaccctcatcttgtctccagctcaagtgctgtggcttcaccaactatacggattttgaggactcaccctacttcaaagagaacagtgcctttcccccattctgttgcaatgacaacgtcaccaacacagccaatgaaacctgcaccaagcaaaaggctcacgaccaaaaagtagaggtgtgggctggcatgagtgggtggggactgttttcatggcctcagagtggcaaacggggatgggagtagggcagctgccaactataaatgctcttttctcttcctgaagggttgcttcaatcagcttttgtatgacatccgaactaatgcagtcaccgtgggtggtgtggcagctggaattgggggcctcgaggtaagcagatgaggaggctgggactgggacatgggcatgagaccagggctgctcaacccatctgaggcctctctggaggaaacagacttctaactgggcctcaggtagggtgtctgtgggacaggcttcaggatccctatcatgttccctcatctctccctgttcctccctctccagctggctgccatgattgtgtccatgtatctgtactgcaatctacaataagtccacttctgcctctgccactactgctgccacatgggaactgtgaagaggcaccctggcaagcagcagtgattgggggaggggacaggatctaacaatgtcacttgggccagaatggacctgccctttctgctccagacttggggctagatagggaccactccttttaggcgatgcctgactttccttccattggtgggtggatgggtggggggcattccagagcctctaaggtagccagttctgttgcccattcccccagtctattaaacccttgatatgccccctaggcctagtggtgatcccagtgctctactgggggatgagagaaaggcattttatagcctgggcataagtgaaatcagcagagcctctgggtggatgtgtagaaggcacttcaaaatgcataaacctgttacaatgttgccagttggactcttcatgtatccttggggagaggggcctaaactggccacggattcctgtggggctgccaactcagaaggccctggaaaggagggaagtagggtggggttgggggtcagaagtggttatttctccccttcatttgggttccaggccttggagggaaactaagagggatggctgagagggcatgaagaagtacagtt

SEQ ID NO: 2828 - DNA, 295 bp, Homo sapiens
tttttgtgtttttttttttttttttttgagagagtctcgctgtcgcccaggctggagtgcagtggcgcgatctcggctcactgcaggctccgccccctggggttcacgccattctcctgcctcagcctcccgagtagctggcactacaggcgcccgccacctcgcccggctaattttttgaatttttagtagagacggggtttcactgtgttagccaggatggtcttgatctcctgacctcgtgatccactcacctcggcctcccaaagtgctgggattacaggcatgagccacc

SEQ ID NO: 2829 - DNA, 722 bp, Homo sapiens
aaaaaatatggggtcagaatggttgggttttaattgtgactctgatagttactgattacggaaccttgggcacagtatttaactagtctatatatctgcttcctcatctgtaaattggaagttattataaagccttccatatagacttcttatggaaataaaatgaaataattcatacgaataccctggcacatattaggtactcagtgaatgttagctagtattacaaatgtctatgacaatttaattagcatgatgtctagaaccgccattatttgattagaattagtttagcaggaggatgaaaaaactgagaaggaccctaaaatgagtagccatgctgttttatttactcctttctttatttaagacatgaacaacactctaggtacagttttatattttaatggctatgttgtcttctcttcgtccttacatgaaataccctcaccctctcccccagaaaaaaagaaaagaatcattccattgttagaatgcagtttagagattataaactccaaactctgtacgtcattaaaatttatattcactgggaccttgaacttagtcttcaacttttacatgcaataccattagtttatttaagttcagttgattcactgtttgtctccctccacaaaccaacctcttgcatcagatgttctccttaacttgcttagaggcctgccatttctttggatttttttttccattttatcacc

SEQ ID NO: 2830 - DNA, 37874 bp, Homo sapiens
ttttatttttaaaatttattattatacttcaagttttagggtacatgtgcacaatgtgcaggttagttacatatgtatacatgtgccatgctggtgcactgcacccactaactcgtcatctagcattaggtatatctcccaatgctatccctccccctacaccacgccacaccagtccccagagtgtgatgttccccttcctgtgtccatgtgatctcattgttcaattcccacctatgagtgagaatatgtggtgtttggttttttgttcttgcgatagtttactgagaatgatgatttccaatttcatccatgtccctacaaaggacatgaactcatccttttttatggctgcatagtattccatgctgtatatgtgccacattttcttaatccagtctatcattgttggacatttgggttggttccaagtctttgctattgtgattagtgccgcaataaacatatgtgtgcatgtgtctttatagcagcatgatttatagtcctttgggtatatacgcagtaatgggatggctgggtcaaatggtatttgtagttctagatccctgaggaatcgccacactgacttccacaatggttgaacagtttatagtcccaccaacagtgtaaaagtgtttctatttctccacatcctctccagcacctgttgtttcctgactttttaatgactgccatttaattggtgtgagatgatatctcattgtagttttgatttgcatttctctgatggccagtgatggtgagcattttttcatgtgttttttggctgcataaatgtcttcttttgagaagtgtctgttcatgtccttcgcccactttttgatggggttgtttgttttttttcttgtaaatttgtttgagttcattgtagattctggatattagccctttgtcagatgagtaggttgtgaagattttctcccattttgtgggttgcctgttcactctgatggtagtttcttttgctgtgcagaagctctttagtttaattagatcccatttgtcaattttggcttttgttgccattgcttttggtgttttagacatgaagtccttgctcatgcctatgtcctgaatggtgttgcctaggttttcttctagggtttttatggttttaggtctaacatgtaagtctttaatccatcttgaattgatttttgtataagatgtaatgaagggatccagtttcagctttctatatgtggctagccagttttcccagcaccatttattaaatagggaatcctttccccattgcttgtttttctcaggtttgtcaaagatcagatagttgtagatatacggcgttatttctgagggctctgttctgttccattgatctatatctctgttttggtatcagtaccatgctgttttggttactgtagccttgtagtatagtttgaagtcaggtagcatgatgcttccagctgtgttcttttggcttaggattgacttggcaatgcgggctcttttttggttccacatgaactttaaagtagttttttccaattctgtgaagaaagtcattggtagcttgatggatatggcattaaatctataaattaccttgggcagtatggccactttcatgatattgattcttcctacccatgagcatggaatgttcttccatttgtttgtatcctcttttatttccttgagcagtggtttgtagttctccttgaagaggtccttcacatcccttgtaagttggattcctaggtattttattctctttgaagcaattgtgaatgggagttcactcacgatttggctctctgtttgtgtgttactggtgtataagaatgcttgtgatttttgtacattgattttgtatcctgagactttgctgaagttgcttatcagcttaaggagattttgggctgagacaatggggttttctagatatacaatcatgtcgtctgcaaacagggacaatttgacttcctcttttcctaattgaataccctttatttccttctcctgcctaattgccctggccagaacttccaacagtatgttgaataggagtggtgagagagggcatccctgtcttgtgccagttttcaaagggaatgcttccagtttttgcccattcagtatgatattggctgtgggtttgtcatagatagctcttattattttgagatacgtcccatcaatacctcatttattgacagttttttgcatgaagggctgttgaattttgtcaaaggccttttctgcatcaattgagataatcatggtttttgtctttggttctgtttatatgctggattacatttattgatttgcatatattgaaccagccttgcatccctgggatgaagcccacttgatcatggtggataagctttttgatgtgctgctggattcagtttgccagtattttattgaggatttttgcatcaatgttcatcaaggatattggtccaaaattctcttttttggttgtgtctctgcctgactttggtatcaggatgatgctggcctcataaaatgagttagggaggattccctctttttctattgattggaatagtttcagaaggaatggtaccaattcctccttgtacctctggtggaattcggctgtgaatccatctggtcctggactcttttttgttggtaaggtattgattattgccacaatttcagagcctgttattggtctattcagagattcaacttcttcctggtttagtcttgggagactgtatgtgtcgaggaatttatccatttcttctagattttctagtttatttgtgtagaggtgtttgtagtaatctctgatggtagtttctatttctgtgggatcagtggtgatatcccctttatcattttttactggaaggtggttcttttcactgggatctcataaagctagcaaattactttctgtgggatgactgagcccatggaaacgcaggcattcttgtcatgtctaataatgggatgtagttcctcccagtccactgtctcctctccttgttttctgctgttatagactgcatcagccaacattatgcattctgaattctccaggagggactgaagcagtcatctcaatgttcacacgttcctccaaactttaggggccacatgtcagtttgtttcagaatcttctcatcccagggttatgtggagatttggctgcacatctctgcagctcagcaagcctgaggtgagaattgagacactgctttctttgccttgcaaaatgcaccactcacttaacatatgggagcacttgtgaaaagaagacaagtcagaagcccttctcttcccttggataacatctcattgcgtggacgactctttctctctcaaaatactccataattctgcatttgagaggccagaggtggtaggttggtagccggtttggctgcttattaggaagccctaggaaaggtgcctagtgagtgctctttagaatcccttctgttaactattctcaatatttagggtttagctgaaatgtttgaaacaaagaaaagtcctatttcacatcttgtacttttaaagcactcatttacatctaaagaaatgtgactgtagaagttaggttatattccctaaggccacaaaatttacttattaaaagtcaaaatctgatttgtctgtaggttattctcaccccaaacctccttttcagttcattgtactatttacctccaaatatgattgttcaattataagtggttactgtagggcatgtgtaagttgagataaacagcaacagaactcttcagtatttatttagatacagcataaaattgggttttgatattgtaggcatattaaggctagccagcttaattggctcctgcatttgtgctaacaactattagtctttaccccccagtaagtgaagaaaatacttgatatagctaaagtagtacctagctcattctgagacttcagtaaatattggttaaatgagagactgcaggaattcaaagtgagctgatgctgccactcccaacaaacagtgacttctgctgagttttttctgatacttttactgtgaaggtctcacttttgttcatgcatctgtcatcaacccttatattcaaggaaatgtctccagaatttttattggatgactgcattttccttacatgcaagtaaaagaaataccaggctttgaaagcgggctgattgagtgagagttgaacatttaatcagcaagaacgcacttaaaagtgccaagttgtagcaaaatctagggaattttaactttacatatgaaatccttttctgctccactatagcctcaactttctttcagtttttaaatttagaacattctggtaaatggccactgcagaagagtttaatatggtacaataataattcttatttttctcttactgctcaaaggaaaaaaaatctggataaatcccagggacctttaaggagttttagaaactgtcctcttcattaggttaatccactaaagatcaattagttaaaatgctatttgaaatatttagttcttttcttagagataaagtattcatttgtaaattgaatctattgaagatatttccatataaaataaagagtgaaaaacaaaaaaaaaaattgaatcacagctgctttatgtggactgatagataccttagtgcatttgcagcacaaatccaacatttaaaatatttaaaaatacatctctgtatgtggaattttagaaagtattaagctatagtgagagaaagctgatcagcctgaaggagttggggaggggcttgactgtaaagagacatcaggaaacattttcaggagttagaaatgctgtctatctcgactgtgatagtggttacaggaatatttcctagttgcccaaatttacccaatggtatacttacacaatgggtgaatcttttgtatgtacattaaagctggcgggtggggagaagaggaaaaaaaatcttattgaatttgggctattttacttgtaatatcttttatcctgataaaacagatagtactgtggtagacaaagtgttttatcatctacatagaataataaaatctcaaatttcaaatgttattcattcactgttagtcaattggcattaaagtgttgctttctgtgtttcaggaacagtgcaatttgtgaggtacagaaagccaaataaaacagtctttgcctaaaggaagtgtaattcattatccattgctatgtaacaaattaccgcaaagtttaatggcttaaaacaccacacatttctcatctcagttatcatctgtgagtcaggtgtccaggtgttgcttagttggtatctctgtctctactttggggtatctcacaagactgcaatcaagaagtcactcaggcctgggatctcatctgaaagctagactggtaaaggatccgctcccacgctcacttacatagtcgttggcagaattcagtacttcaagtgctgttggactgagggcctcagtttcttactggctgttgaccagaagctgccctcagttccttgacaggtgaccctctccatgtgactccttcatcaaagagtgcaggctgaaaaggcaatagatggtcagttaggaaagggaagtcacaattttttataacccagtcacagaagtacatcccttcaatgacgctatgtactgttgcttagaaggaagctacccaagaaaagggaattaacaaggacatcaatatcaggaggaggagaccactggcggtcattctaaaggctacttaccactagaagcctagttgattcaacttactatccaggattaatacatcaagaagtcatccagcaagtgctttaatcttttctgctacacagaatagtgtataagagtggtggctttataatcagacttctcttgcttaagttgtcgctaacccttattagccatatatctgggaatttattaaaccttctaagcatcagtttctcaccataaaatggtgtatacctcataaagtgtgaaaattaaacacaataatgaatatatagttctgagtatggcacctggcaaatagtaagcatgcaaataatgataattattttttattatatatctacttactttattcctcacttgaaatccagctctctgaattttcctgttgttgaaattagtttaccaacttggaacttattaatcaccatatccactttaaaatcctcaccctgcctttaatttacatctgaagacagtgtatttgttgccttcattttctccctacttgtgcacactccagtcttccactgtttctacagatgttccttatgtaacatgatttcaagtgtcgttcacttccttctgaccacatttgttgcattataacataatgaatctgtaagtcatcacatacaactaaataaattccaggtgtagcttgttccatgcaaaaggaatcaagattattactagtgatgtaaataacctatatgtattgaacaattttaagtagtttttaactagtacaatgatattcatgaatctttttcttgaaaatgatagtagtttacaaatgatctaaggagcagcaaatattattaaacactttgcgtacttccatccagatttatcaaaattgttatgaagctgaaagcatagtgcaagaatacagtttggtgcctcatggttctttttatgtactttgtttaatataaggtgatttagcaataatatgattaggatgcttactgtaaaaactccttatctctattattgcttaggcacatagtttttttatagttgtaagacatgaaatatttatctatatgctataatgaactatttactggatataccatatatatgatgcttattcactggtgataaacccatgattgtttttaaatatagattttcatgattagattaataatggaattcacactctttgatagttcaccattatatgcaaaggttttttacaaaaatgatagaagttccaaatattttttcccaagttcacaattcttacaagctcacataaaaataggaagtgtggtttttctcaggggtggcattttctcattattctccttagaaaacataataaagtgaagttcatttactcatttatttttggctttaatattaaacacaaaatatatttttattggaaaggtcaacattgtttatttctgcttgttaaagtatacatgttcctggtaaaacatttaggaacaacaaaaacacaaagaagaaaataaatattaccataactcatagacaattgctgacccatttaatgcatattttagacaattatcataagatcactttttttctgttggaatattagtattttattaaatgattttttaaaagtccttgtatacatatatacatacatgtagtgaagatttaggcttaaagcattttttatttctgtctttgttgtcactgttaggatgctttatttctgttgcaaccacattgtgtcctcttattattccatttctaataaaaaatatagaataacaatattaaaacataaatttttccttgtatgttgtttgtgaatttttgagtgaagttgttttcaataactcagaattttgagttgaaaatacgtgaggatttctgtgatcaaatatttgttatctttttgtaaagagtgctgatttgattagttctaaaaatcatcagtgtaatctgtaaatgatgtaatccgccatcagcacttgcacttttcttcagattattatagaaattcaaatcaataacattttgttgttttctattaaataacatttggcacattacgtatgttcatatggttaccaatattccttaaaaatagcaaggttttaacatgttcatgatatccttaggtagagtctaataacagagaacatttgtgtgaggataactattttaaaatatactctcttttttgaaatagattgtgaaataatctttggtaaaatctctatctttgttaaaaattcccagaatgagaaatgtgaatgtaaaatacttagaaaacttcctttcctagggatgtaaatttcactattataatctttatttataagtcactcgttaaaatggtcttgcttctaggataagaatgcagttcttcatagaataatatctaatttgaagttttgctaatagttttggaagtgaatgtatttttttaaagttttaaatacattcattttagcatattgctttgactatatggactaatttatcaattaaaatatttctattttcatttgatagtaatttttttcaaaaacttatattgtttataaactcagcaagtcttcagaaacatgtttgagtttgttgtatgcatccagattaggtcctagatcaggatgcttttgaattaacttgaaataagaataatatctatggtctatttttatttgaaagttttaccttcccatgatgggctcattttgttaaggatttctttaaaaatttgtggcatatatttgaaatgaagctgcctaaaagataatttatatagttcttaaaagatcatcaaatctcaggtctgcatttaatatttcaaccagtaatgttattgtgctttaaaaactctggtaagataaaagtagacttttacaaaatgaaattgtttcatttattcactcattcattcattcaataaacattaaagaacccttgttcatgttccagacactgggtatataatcacctgtggactagaaggaaaaatgacagacacagaaaccattttaaagaagataatacattattgttaattatagttaattaaagaaaattaatgaaaattcctttgatataaatacttaggtcttacctatattagtaatgtccacctatttttaattaatagagattagcaactctgaaatttataaattgttaaagtttttcagtaagcttttaaggttgtgtgagatatagttttagaaaatatttgaaaaaaaaagtcacattaaaatgatcaggattgtcttttgtttctgttttataatcaagggcctaacatctaatatgtaaatattcttctagtaagcaattaatgtggttattataatcttattattcatagaatatcccccccgccccataaatatcaacttcctaatccccagaacttgtctaagttacatggcaatagggacttagctaatgtggtcaacgatcttgagaagggaagacaatcttggattacccagttgggcccaatgtaattatacagtcctagtaagaggcaagccagaggatcaaagacagaaggaaatggacaacagtggcagaggccggggtgatgtgccttgaaaatagagggagggctccagccaagggcaccttctgggatctggaaaaggccaggaaacaaaaatttctcccagaaggagtgtaccactacctataccttaattttagtcctgtaagactcctttcagacttctgacctccagaactgtagaaaataattttgtggtattttaagtaatttaaatgtatgataattagttacagaaacaataggaaattaatacaaacctacacaattataacattgtaaaatggcctctgttgtgacaatttaacaaaatgccaggttttttccccagaaaaatccctgcagagatgattagctattagagcagagtgtgaaaccttttaacaaaggtaggctagctggtaactgcccattattaccaactaagtctttgaaggtagcaaagcaatacaaaagcaggtactcgtgtaacctaggccagaaccaccacatttattgatttttcatagcttccttttaactgaatccccagataccactagaattttatgaaatgacttaagaataagacatttgaacatgaaaatttaggtgtttcttcaactgtcacacattcaaagagcccctcctggtaatctgtgtgatcatgttcttgcatcagtcgcagacaagcaaaaagctgaactcagtactgcacctcctgttttctgggagtatttaattttaagagagacccatacttccttttataaggtgaagggaaaagctgtaatagcttctttgccattagttttgaaactctagagttcattaaaactccctttggctttcttcactgccatctttctttcttcttatgaattattcaagacaaatttcacttgaggtaaatagtttgatttgaaggtttttgtatctggatttagatgcaacaagaagtgttaaatgctcagaattttaagtgtagagaatggcacagactcagctattaagatggaagacatttgctgttaatgttccagggctgctgttgcgacttcagcttggtactattattcattctgaagtaggcaggcattatgatgcctgcagtataaatcagattttacagagagcttgatccgcaagcactttgaacattccatccacttctcagttaacagaacattttttggttttacaaggtaaagtttcttttttttttatccttgccaatacattattaatctctttttttcatatattgtataccaaaccacaaaacagttttagactatacatgtctcttgaataaagcgaaattgtaagttttgaaagtttcttctttcaataaatattgtgaaagataagaggacctagaaaatatttcatttttataaaactcaacgtaagaccctttcttctttcacagtagtaatatcttttctagatattgtgtcataattttaatcttttaaacacttagctcatggagtcacacacctggaaaaatgatacatggaacatatgtctgaaaactaccttattttggaacttaagaattggttcaatgaatgtaccacatttaaaaaccaatccaggccagtgcagtggctcccacctgtaatcccatcactttggaaggccaaagcgggtcgatcacctgaggtcaggagtttgagaccagcttgaccaatatggtgaaaccccatctctactaaaaatacaaaaattagccaggtgtgttggcatgcgcccgtagtcccagctactcgggaggctgagacaggagaattgcttgaatccaggaggcagaggtggcagtgagccaagatctcaccactgcacttcagcctgggcaatagagtgagactctgtctcaaaaaaaaaaaaaaaaaaagaactatgcaaagaaatcttattatagttttgtctgctactaaaattcactttcctaatgtcagtttctattaaagttgcctagataaaattatgtttatgaaattatgcccaggtagtactgctttcaggcaaagcatttcattcccgtttcctgctctaacacaatatcacaagcagcaggagtttcattactaaagaataataaaaaacatttattaattgctatatgatagaacatgtgctaagtactttacatgcatcacctaagttaatgctcacaatgagtcttagaaatagtttctgttagtgcccccattttatagctagacagttacatggagagcacagtcttgtaatccctctgtaggacatcagaatccatgtccttaaagactaccaataagtgcaaactcaaaatgtacaggaacatagatttatgaagttgcctagtataatgcaatatgaaatggtggatactgtaacaaattgtcaacaatttacatgcatttatatttaaactacaaatccagcaaccaataatttatttgtgggctatattcaggtttcagccctctggtttttaactcaccacaaagccacactgctttcaaaaccgttcatttacatgcataattattcctttatttatttcaatcttattcagattttatcaggcaatggaaacatgcagagaacagaattacattgtaattacattgtaatcacaatgtcttataaccctttccatggtaaaggattacccattagcccagtcatgtagtttacctgttgttagaagggaagaaggaattctcttctaagtctgaaggagacacaggttgagaatcttttatccaaaatgcttgggggccgggtgtggtggctcatgccgtgggtggatcacttgaggccaggagttccagaccagcctggccaacatggcgaaaccctgtctctactaaaaatagaaaaatttgccaggcatggcggcacatgcctgtaaccacagctacttaggaggctgaggcaggagagtcactcgaacccagaggcagaggttgcagtgagtcaagatcgtgccactgcacttcagcatgggtgacagagtgagactctgtctcaaaaagaaaaaaaaaatgcttgggaccagaagtgtgtcattttttggattttggaatatttgtatatacacaatgaaatatgttagggatggaacccaattctaaacataaaatttatttatgtttcgtatacacgttatacacagagtctgagggtaatcttatacagtgttattaataattatgtgtgacctgtcacttgaggtcaggtgtggaattttccaagtgtggtgtaatgtcaacactcaaaaattttcggattttggagcatttggagtgcagattttcagacttgggatgctcagcctgtgctggaattgcaagaatgttcagactcaaaagtcaaagaaaaagttgagttctgaagagggcacattaattgaaggggccaacaaaatgtattaaaatttagcctgtagtgctcagtgtcttattgccatgaatatgagagtgatggtggctaaggaagggaactggagccatatttctaaatcgggctttatattttgtaggtgattgtgccagccatagtgtaaggcagacatgagtcatttttcaagggacttgggatgaagtgcatgtaaattttggacatgaaaatttaagggcgaaagagatgtttaaatcctctaaggaaagctatgggaaagctgtgtaggcaccattagtttatttggatcatgaagtccaggtaagagattttcatgttcatgtgtcaagtaacaaagataagtaggaaaagtgttgtcatgtgttttattatttaataaggaaatacattttgttatgaatgaatacatttttttcttggcgtgtttaattggtattccttctcaaaatgtccaatgactcatcaacttagttatggcaggcatcttaatttgttaagttgcttaagttttctggttgttcatttccatgaagctgtgtgtgggatttataagctttttcccccaatggatatgctaataaaatacaaagtttgaaaatcactgagactgattaatcatattcctgtcagctctaaaattcagcagctcaacagtcagttatgtcaagggtgtccattatctgatcattctttctactgaaatgtgctttcttttcttcttcttttttttaatcttttcttctattctgttactttctattaaaaaatgaacttcattgaatcttaactcaatgtttcagtgtggggaaggtttactcaccattatggaacatttgaaaatatgtaagaggccaggcgcgatggctcacacctgtaatcccagcactttgggaggccgaggcgggcggatcacgaggtcaggagatcgagaccatcttggcttaacacggtgaaaccccgtctctactaaaaatacaaaaaattagccgggcgcggtggcgggcgcctgtaatcccagctactcgggaggctgaggcaggagaatggcatgaacccgggaggcggagcttgcagtgagcccagatagcgccactgcagtccagcctgggcgaaagagctagactctgtctcaaaaaaaaaaaaaaaaaaaaaaaaaaaaaaagaccttactattagcatttagtaaccagttagggatattgttaaacatcatgcagtacatcagagaatattcttatgtaaaagatcaatagcactgtttttgagacatattgaaatgggttatgactctatagcctgacagacattgcagtaaaactttttttttttttctgataaggactttaatttctggatttatttggtcatgctctctgcctcaagcacctttctagttaccctgtcaaaaatcttgtttgctcttgaaggcttagttcagatctcatctcctttgtgaaatcacttgtaaccctttcactttactataaactcagaggtctccctactttttgatggcccttgtataatctcttgaacacaagcttgaataatctccaaatgcaatggcaaattgagaaaaatggtactggcttttccattctgctttccgtgtgagttgtgtaaaagggccaagacatatcacttttgttttgttttatttaaattattgttcctacagagaaatagatgataaatactgaaataatagtgagtcatccttatacacaaaaacatcaccatagcaaatatgctacctaagataaacatgctgcatagctcaacctaactttacttatttgtagttaattcactataagaactcattgagagtacagcatgaaacttgttttttaatatcctttcttgctgattgtgtctcaaatccataacttagattttaatatatagactacctgatgataataatggtgttctagaaataaaggcagctttcggagcttctcttaaaaaaattaaagaccgtctacatgatcaactacctaccagttaactgaaacaagactgggtatcactggcccactgtcctagttcaaactcaatgaaggaatcaacactattctagatcatattcttaacactatgatcttagtgttaagaaatagaaaatccttgactcctgccatatgtcagtagtgaaaatagacccttccaagaccatttccaatccttacctctagaaattacatgctgtttctgattttcagcacatctcaaagagattcatatttcccttgagttacagttgttgtagtttgtaaaaatgttcctatttctccatatcctctccagcacctgttgtttcctgactttttaatgatcgccattctaactggtgtgagatggtatctcattgtagttttgatttgcatttctctgatggccagtgatgatgaacattttttcatgtgtcttttggctgcataaatgtcttcatttgagaagtgtctgttgatatcttttgcccactttttgatggggttgtttgttttcttcttataaatttgtttaagttcctggtagattctggatattagccctttatcagatggatagattgcaaaaattttctcccattctgtgggttgcctattcattctgatagtttctttttgctgtgcagaagctctttagtttaactagatcccatttgtcaatttttgcttttgttgcaattgcttttgatgttttagttatgaagtctttgcccattcctacgtcctgaatggtattgcctaggttttcttctagggtttttatggttttacgtattacatttaatctttaatccatctcaagttaatttttggataaggtgtaaggaaagggtccagtttcagttttctacatatggctagccagtttttccaacataatttgttaaatagggaatacttaccccattgcttgttttcgtcagttttgccaaagattagatggttgtagatgagtggtgttatttctgagggctctgttctgttccattggtctatatctctggtttttttttttttttttttttttttttttaaccagtaccatgctgttttggttactgtagccttgtagtatagtttgaagtcaggtagcgtgatgcctccagctttgttctttttgcttaggatcatcttggctatatgggctcttttttggttccatatgaaatttaaagtagtttttttctaattctgtgaagaaagtcagtgatagcttgatgggaatatcattgaatctatgaattacttttggcagtatggcattttcacaatattgattcttcctatccatgagcatggaatgttttttcatttgtgtcatctcttatttccttgagcagtggtttgtagttctccttgaagaggtcctttatatccactgtaagttgtattcctaggtattttattctctttgtagcaattgtgaatgggagttcactcattatttggctctctgtctattattggtgtataggaatgcttgtgatttttgcacattgattttgtatcctgagactttgctgaagttgcttatcagcttaaggagttttgggtctgagacaatagggtttctaaatatacaaacatgtcatctccaaacagataatttgacttcctctcttcctatttgaatacgtttatttctttctcttgcctgattgccctggccagaacttacaatattatgttaaataggagtcgtgagagagggcatccttgtcttctgctggttttcaaagggaatgcttccagcttttgcccattgagtatgatattggctgtgggtttgtcataaatagctcttattattttgagatatgttccatcaatacctagtttattgagtgtttttagcatgaaggagtgttgaattttgttgaaggccttttctgcatctattgagataatcatgtggtttttgtcattggttctgtttatgtgatggattacatttattgatttgcgatgttgaaccagccttgcatcccagggatgaagcctacttgattgtggtggataagctttttgatgtgctgctggatttggtttgccagtattttattgaggaatttttccatcgatgttcatcagggatgttggcctgaaattttctttttttgttgtgtccctgccaggctttggtatcaggatgatgctagcctcataaaaagagttagggaggagtctctctttttcttttgcttggaaatttttaaaagtaatggtaccagctcctcttggtacctctggtagaattcagctgtgaatctgtctggtccagaagttttttttggctggtcagctattaattactgcttcaatttcagaacttgttattggacctaatagacatttatagaactctccaccccaaatcaacagaccatacattcttctcagcacaacataacacttattctataattgaccacataattggaaataaaacattcttcatcaaatgcaaaagagtgaagatcataacaaacagactgtcagaccacagggtaagcaaattagaactcaggattaagaaactcactgaaaaccacacaactacatggaaactgaacaacctgctcctgaatgactactgggtaaataatgaaattaaggcagaaataaagatgtttcttgaaaccaatgataataaagacacaacataccagtatctctggaacacagctaaagcagtgtttagagggaaatttatagcactaaatgcccacagtagaaagcaggagagatctaaaatccacaccataacaattgaaagaactagagaagcaagagtaaacaaattcaaaagctagcagaagacaagaaataattaagatcagagcattactgaaagatccagagacatgaaaaacccttcaaaaatcaatgaatccaggaggtgtttttttgaaaagattaacaaaatagatagaccactagccagactaataaagaagaaaagagagaagaatcatatagacacaataaaaaatgataaaggggatatcaccactgatcccacagaaatacaaactactatcagagaatactgtaaacacctctatgcaaataaagtagaaaatctagaagaaattgataaattcctggacacatataccctctcaagagttacagttttaaagatgactttgattttcaagttttaacaagagaatagaattgtttcttcaaatacactaatatatttttgtaggatattacataaaactgtagataaggatgtgtctaaataaattcatgcttaatttttaatcagtttaataatctagatattttcattcttttttttttttttttttttgagacagagtcttgctctgtcacccaggctcagtggcacgatctcggctcactgcaagctctgcctcccgggttcacgccattcgcctgcctcagcctcccaatattttcattcttaatggataattaccataatctagaaaaacaatgcaagacaattgcagacttttgttaaatatgaaaaagcaaggtaattctgtaccatttcatacctaaagtaaaaaaaaaaaaaaagaataacaaaaagttaactgtaccacctatttttattctaaatatggagcatagtattttatttaagtaaggaactgttatatgtatgcttacatttcctaagacatcttcagagcattacttttttcatgttcttaaatggctatacaagtagtgtaaatgttcaatagccagaattctgtatgtaatatatctaagtgttatatatgtatgcatatctaagtgcttattctctttccagagagattatgaattttcaggatttaggaagtccagttatattgcctcttgtgaccttgggttgtacacccactttgaaaatcagtttggcaatatgaagccatatgggagtagtgatgaaaaataaatggagaaaaaaccctatcttctgcttggtttactacctaacatttgggaatataatattaggtaaatatattcaaatatattgtggatcagaaagtgctgggtaagtggaaaataagaggtggcacttctgggcattttcttttgatataaccattttgaataaaccatttacacaaacatacgcatacaacctcttacctaggaacatcaaaactgaatatttaaattatgtagtcaggaaacatttcgactaccatgggccctaggagtctaaggcatgttgaaatgaataaaataccaatactttctggaagcattaaggaacctcatgcattcagtatttgctggaatttgtccttttggcattgaaaagagataatgggtgattacactgtcaaaacttctaattctcaaatataatcttcaaaggagtgcctgtgcagacataggcagaataattttaatggaccttgaagcatctggaaacatagaaagaaaccttgcatagcaacacaggaacattgctgatatttttgtttgttctctctctctctccctctctctctctctctctatatatatatatatatacacacacacactcacacacacacacacacacaaacacacacacacacacaagaatatattctgtgtggtcttgaatgagctattcaaagtctccatctgtcatttccatatctatggaatggaagtaattatgatgatacagcatgggtttagtttgagtgtgaaatcaggcactgcataaatggcacgcaaaagagtgcctggcaaatgataagtactcaatacttgtgttgggaagaccacaccactacatagcttcctgcctttcctcatcatggggaatagttccatatttaagagaatatgaaagcagtgaacagtatcttattttgaaaaaacttttcattatgacagatttcaaacatgcaaaagtagagacaatgagtgaatgaaggaatccccatgtgtctatcattcttattcaattatcaacaattatcagtatctacagtgttaagataaataatttgcaaaggtagtgaaaataccttggctcaaaactgaacatgttcagaaccccatatactttacatatctcttgaggtaatagatttccctatgtctctgtaacaaataaatatatttacctatattctgttgttagatagatgggtttgaggaaaacaaattcactaaatgcagaatcaacttttacaagaaaaagaaattataaatgaaaagcttttaaaattggttcagtttgcaaaactgatactaagaaaatatgtcaatacatttttcatcagaataataatattagctaaaatcatagattgcttctatgaaacaggcttagcatcatctcaattttcatagcaaccctattaattaaggaacactctaattatcattatatagatgaagaaattgaggttttgtaaatgtaaacaaattgtccaaggcaagtggcaagactagaatataaatccagggctgtctctagagattattcgtaaccactataacatatctcaaaacattttagtcattagcctaataaaccaagaataagaacgctatgaaaccttattttacttaaaaaaaagtttttttaaacttatttattttaattatatctgtaatgatacattttataaaatttataaatgtttaaaatgtcatccacatgggattaaaagaaaatcataaatctcatcagggacaaaatggaaggaattttttcagaccatttttctgttgaacacaatagaagtttagcttaaatatgcactttaattaccccatattttgattccttgatttcaacaaaaagttctgaggttacttagaaaaaaacctagcatactctaatgagattttcagtaaatagaaaaactctgtcatatatgccatacaaagacaaataaggttcaaagtaataaaatatgtcatccagcaaaatctatgctacagatttaatgatgatgacaataatttagccaaggccagctgctgtactaatagaccccaaatccttgtaatggcacaaaacaacagaagcttctttcttatttcatatagcagcatggggtggatgaataagtgtccatggacgctctctatgtagtcattcaagaacccaggtgggttggggctcttccatcttcaacagctgggttcctgaatgattgcatggaggagacaaccatggacgcttgttcatcagttcatcactagtagtcatcagtcaagaaatctaagaataagaatgccatggaggcagggttatcagataaaatgtagaacaacaatgctatatgtagaacatactagcactaaaatattattctgtatttacctgaaatttaaatttaactagattttccatattctgtttgctaaatatggcagcactacatgtaactatgtaagaaaaaaaaagaaactgtgcattaaccttttaaataaatatttttaatagtatcacccttaaatgcttagcacaatgctataattaactttagtcatcctgatatggaaaaagtagtgggataattatctcttaattatgtgacgaggaaagaaaatgtaattttgacctccccaagtgggtaaatgactaagattagaagccatgtccactcattactagatcctgcataatcttgcataaactaatatcaaatattttaacgtttgaaagtatgctaaatgtttatcagagcaggtgattttatttcattgagttctcatttactcatgtatatgttaatttatctattatgtattcaaaattactcaaatattgtattgagtgctctaggataaatattaataagtgaaaattaacactaatatatctctgattctttgcaatgtgtataattaattacctgaactggacactattgagagaaaagggatgcttttaataatcactccagaacaacaggggacagcttctggaaaacagggacaaataattattctgttggtccacctgattttaagttttccaataatagaatttcagaggagagctatcatagagctcatttaatataattgcactttatagacgaagaaatctgaggcccagtgaaaagaaataataatttctgtatattaatgtttctcacttaagtttatgacattttttaatgaagaatgattgatatgagactttttccatcgtatactcctcttgtactggaccaaagattgttgtcttctaaaacaatacgtacttcaactaagatcctaaagaccataattaaatcttaacacattaccaggtatctctatttattcttttagagcacaaatccactttttctaaacctattaagaactaagtatgtgttgcatgaagttttaaagtaatatttcatcttacaatccagaaaactcttttatattctaatggctctatgatgttgtagaacaaatgacatgtcattatttgaccgagaatggaactaaacccaaaaatggcccagccacagaatcttaaaatcttctattaatatggtctctggtaaatataatgagctgaaacacaacttctatggtatttttagagataaacattattttctcttgaaattctcacagtattcttttagtgcttacatgtcagatgtaggtttttaattgttaaacatgaaaaatactctgataatttaactactcctaaatttaagtgtatatatgctttcttttttgttcacagtaatgtaggagaagcagtgttaaatgatgctaggaatctgtactctagaaccggattgcctaggttcaaattctgatacaaaaactctatggcttttgaaacaaggcttacatttctaaccagcctattcatcactgttctcatctgtaaaatgggattcattatggtaataactacataatccagaacagataagtaaatgatttaattaatataaaacaattatcagagtgtatctgtcatgtattagacataataagcgtaagctttcatcagtatgttatttctttaaaaaaatccctcttttctctgccttataatttttggataattttttccaaatataaactggtaaattataaaccagttaaaatatcaggacattattgtttacaatatgtcgtttttaaaaactaattaagatcacattgcagtgaagaatgaccccatttaatatatattgacattatatttttgagcattttgtagattaaataaaacaaaaaaagatttaatacgaaacattttctatgtttgataaagttgcatgtatattatcactgttattttcttacctgttaaggaaaatattaccccaaatttaagttggaattttaaaaatgcatactattaagagtgaataagagtttatattctgcttgaattcctggtttatgacatacatacaaaatgagaaaggaaataaactctaggatgaatcttattttagtaagttaatggccttttcactgaaagtaggaaatatttcttctttcaaaagcacccaagatcaataaataatcttgatttaggaaatatgacaatgcaaacttttttcaaaatctgcttaaaaatgtaataaacaccatatcaatgggaatgtggtaataatcagaacaaattttctcaaaaatatatctttttttaagaatgagcaaatcaaatattttggactttattttttcccatggtattatcattaagaatatctaccccaatgtctgctttctccactttcatgcctaaactacagaacatcactggacaaaataataacatcttgctgatggggtccactacccatgacacttcagattagctctcagttggtgttttacagtattttatttccttgttttcattttctagtgactccattttacagttctttcagtgacttttctaaaatttaacagttctgagtgtcatcatactgcttctattccctctccctttaaccagatgatctcaaatccatcaatatggggaacattgaattctttttacttttttttttcctggttttgttctttagaagaacaagaagttcccttcaacagttttcaaccaaacatctgtcttcaagttacatcttcatcatctcaccatcctgaggattaaatgtgataatctatgtaaagcacttaacaaaatatcaggcacttaataataactattatctatcttttcccctagtgaatagtgggcaaagtttcaaccattgattatttgtttaaatacttttatttcagtaaaattgcttgcctttgaatatattttgccagtgctgaaaatcgtcatatgtcttctaatatccaaaaattactgaataaaatagtggttaggagcaaaggggcaggggccagacttcctaggcttaaatgtcacctttgccacttacaagctgtatgacaattgtcaaagacttaaacttgcctctgtatcctcatttggtaagttatttaaaaaaattatctctagtacagtaaagaagaagaagtatgataatatacacaaaatgcgtagaactgcctgccacatgctaagtactaacaatactagctgttattaattttcactgtgtctaaaattcattatttcagcaaatatctattgaaaccctattgaaaactaattgtgatgtgtgattttaaaggacaatgataattatattacttattgtctagacagcaaaaaaaaatacaaagatacaaatcaaagtacaaattatattaaaagctatgaggaagtgtcaggttatcagaggggatgttatcaaatttggaaaatcaggcaagctgagattcttagagtttgtaggtgctcattacaattttattttattttttctgatagtagtaataacatattttctgactatgataaaagccaaagtgttatctatgttctttacgtgaaagttcacttagattctctttctcatatggattatagattgtcccttattcaggaaagcaggacattttttggtctgaagagatttccctctgggtttcatttgtatcaaaagtgaattgtgaatcccaaaggcattcacattgtaagatgatactactagttgggatactgaggttccatttttattcctttaatagcttcctaattatagattccttttcctttaatttcagcctctatattaatgataaaactaatctgcaatctctctcaaataacttttatgctaaaagcaattaggtagatattttcttggctccttagagaggaaatagatttagatatgcagaaagagctttgtcattaaggacccaggtaactacgatcctctaacagttaatgacacaaggaactgggctcaagtagagacatatagtttaaagtgaaaacattttgacctgaaattccaaggtgcacctggtaattggtgaccttaacaagtggttatgacagcaaagtcctacagtttgtggaagatagaaagcaaattcactaaaaggaaaggtaagaggaggaagcaaagagaaagaatgcaacagagaagaagaaaaaagaataaaagttttccctaattaaatgcttactatcatccctttctcactgctattttataatattaattttatatattactaattaaaaactatataattatatacataattaatttttttctggttcttcaaaatatttgactaaataatttagaggtctcaaataaaaatggtaattttaagaccactgtgatcaagttctggaaatttttaaagatctaggaactttttaaagctttaatattttttgattatttttatattttatacaacatttttactaattccaaagaattataaatgactattatgtatttttatttggaaacattttggttatttgggaaaaagtaggtgttagtccagctatacattgtatgtttactgatggagaaaaaaaaaatccctcttgttattagacactgttattttactgatacccaaattctatatatttagatatggtttgggatgagctgtgtaacttatttggacatgtgaacatctttcactatatgttttgcatatgaaaaaaattatctcactttgccttttatttaatgattctttgaaatatattctttgtataaaccttataaagttgtcaaaattaattttcaattagaacatccataaaagtgccaagttattataactactgccttatgattcactcaaagtaaaggataaatccataacattttctattaattgaatagataatcttcattttacaaatgatttccatatagaattagtgttacgataggcagttcttagtgaaatcaatatcagcttatttcctattttgagtcatgaaccaaatcattgtcgtcatcattaaatctgtagcatagattttgctggatgatataatttattactttgaaccttatttgtctttgtatggcatataagacagggtttttctatttactgaaaatctcattagagtatgctaggtttttttctaagtaacctcagaactttttgttgaaatcaaggaatcaaaatatggggtaattaaagtgcatatttaagctaaacttctattgtgttcagcagaaaaatggtctgaaaaaattccttccattttgtccctgatgagatttatgatttttttaatcccatgttgatgacattttaaacatttataaattttcatgaaaaccattttcatatctgttaatataaattactctatcaataattattttttgtagcaaagaaaattaacaatactttgccatttttgttcactttggcctcctcctgatgtcattcttcattttatccacatttcattaatgtgcattttataaactatgctaaaaatagcctcttttgaccacatgtgactgtgactcagaaagtttacttgcatctgtgcttcaaatgactaaacatttttggtttctataatggcaggtgaagggaattaaagaagaggtaaagtaaatattttaactggtgtataatatggttagatcatcctgtttttgtgccttccactatgatttgattacttctaagataaatgatttcgagcatatttgacgtgcaaatatatttaagattcaactatcaacatttgcttagtaattaaaaatttagtttttcaaaaaatgctgagtgccattttgtagctgcagatgaaatttcctaatatcgggaaatgaattgtttttatttgtttgtgtgtctgtttgcattttcccatggcttgctggtgcttatactttatttttcctcaattataaaaatattgttctaaaagagaccttagagttctacacagcaacccacttacacagctcaggaaacatgggccaagagagatgaatgttctgcttcttcagtggttcttacccctgaatgtttgtggtaatcatcggaagcacttgagacccaaggtcagacttctaccactggcagctctaaaatccaagttcggggtgggtcctgaattgtaatttttaaagtcataggtcactggaatggtctgtcaaggctgaaaatacctactcatgcatttagtcttatagaaaggacataagggttattgtgatttcttactagtagaattgaaattagcattaaggcacttaatactcccttcactctaatattctgcctctgtttttttttttttttaatggaagttattctacttgcagacactcgtttttttttttttgtttttttgttttgttttgttttgttttgtttttttgatggaggctcattctgtcacccaggttggagtgcaacggtgcaatctcggctcggctcactgcaacctccacctcccaggttcaagcgattctcctgcctcagcctccctagtagctgggattacaggcgcctgccacgacgcttggctaatttttgtatctttagtagagatggggttttgccatgttggccatgctggtctggaactcctgaccttatgatcgacccgcctcggcctcccaaagtgctggtattacaggcgtgagccaccgcgcccggccgacactcttgttcatccagaaatctggtcaccagtttccttgccagtatctaccagcccattctgcaattctgacggaattattaaactcctctgtgccctaggggcactattgccttatgcacagataacatctaggagacactggtttttttttctggtatatgtaacaaaaaagtaacaaaagcaaattgctgaattgccgttacaatagtacttaattaatatgtatgtataactgtatatgtgtatatttatgtacttagtgtttctgtatttgtattgtttttataggaaatgcactgattctctaatattaacacaaatcctcttcattcaataggtgttaaaaatctctaacacacttgtcagtgctctcagatatgagtatcttttcattgtcaagtcgcagattcatgtctgatttcagaactttgtaaggccagtgaaagtgagtgacgaaggatcatttaaagacaaggtacaaatagcttgtagatatgtttgtatcatataaatttactgtttatgtggcattttgagatctcttacccaattgacaccctttggcaatgaaagtgaatccttcatttatccactggttttatttattcactatttttcattcattcaacatttattgagcattcactctgtaccagatgcaattctaaaagctgggaatacaaaagtagacaaaagtatacctcattctggtcctcatcacacctaatagctactggtcaagacagacattaaatatcatccaaataatcataaaatttactgtggtgagtgcaataatccagggatctaaactagtctgtgcaggagtggaggtggataaaggcccaggggcaggtaaggctctcctgagaaggtggcatttaggaagtagtaagtaggcaaagaggctgaataatagttcccatatgaagagagaagaataaatgaaaaggtgttggcactttcaaggaactgaaagaaaaagagggaaactggaaagtgacatttttacaagtatttgaaacctttttttttcatgtgtaaatgtgggattacttttacctttgcagaaataatatattggattgtaagagttgttttcctgaaggtcatcaaaaattagaatggccattttcctaatttgtcttattatggcagtctcagtattaacaacaggtccagccctctttcagaaaacaaaatattaatagtgacctttttactcctaaatgcattctagtttggatagtaaatcttatggttagcctatctagaataaaagaatatactttacccaattcttaaagttgcaaaggaaggaattctggtaaatgcatacataggaaagtgtagccttcttactttttgttttgtataatgtcttggtatagggaaaataagctaccaaataaccaaccaacattttaacttctcttattttcttccttttttccttccttttcttgttacttttcaaagtgcaagtaaccaatattatggaatgtctaccttatgcatggtgcagtgccaggcaatgggtatgtagtagttaaataggcaggaattagaacaaaaaaaaaaaaagaggaaacaagatgaatttgagggggtgctttgagagggcatgagagcagctataatatgtgctctggttaggagaagaaaaacatagtatttttaagatactgttggagactagtgaccttttcttaacgtttaaaaatataacaagagagtcagttttttctgattcttcatgtcctaagacacaagaatctcttgggcaaggtaggatcctccttggaggacagaaattagaaagtctgaatcagaatcctcagtatttggcagagggaaagaagatactggggaaaagagcatggcttattttcttttcatggtgacactacttttctattgggttgcaactaaatttgggaggttgacacagtatcataaaagcaaagaaagatatccagccctatagtctttttttttttcttttatgatgtaccttcctaggtcaactgagttttgcatattcctcattgctgggactgtagtcacctctctttttattctcactacaatgggaaataactgtcttcagatatcaacagtgtggattccttttaggctagatttcccacacttaaatatcctagtgttatatcagggacgaggagacaagacaaagagacatgccattttcatatttatatttttcccctctccaattctttattttccctccaattccagaaaactcctagcacttctcaaatgggaacatattaaaatcctagcaagtattttaaaaattctattgatagtctcaaggcttcagctttcggaaattaaaataattttgcttctctatttggttcttctttctttttcagtaaaagcacctacttgaagacatagagatcttttcccctactaagttgcccaacaggagatgatcagtttaaagaaaatgtggaaatacaaattcaatctgtaatgcatcacctggttttttccaacacacaagtaattgacctctttatattctgatttaagttcctaagtatttgtgtttgacaagatctgtagtgtctgacatagggcatcctcaaacagcacggtgccaaaaaatatggggtcagaatggttgggttttaattgtgactctgatagttactgattacggaaccttgggcacagtatttaactagtctatatatctgcttcctcatctgtaaattggaagttattataaagccttccatatagacttcttatggaaataaaatgaaataattcatacgaataccctggcacatattaggtactcagtgaatgttagctagtattacaaatgtctatgacaatttaattagcatgatgtctagaaccgccattatttgattagaattagtttagcaggaggatgaaaaaactgagaaggaccctaaaatgagtagccatgctgttttatttactcctttctttatttaagacatgaacaacactctaggtacagttttatattttaatggctatgttgtcttctcttcgtccttacatgaaataccctcaccctctcccccagaaaaaaagaaaagaatcattccattgttagaatgcagtttagagattataaactccaaactctgtacgtcattaaaatttatattcactgggaccttgaacttagtcttcaacttttacatgcaataccattagtttatttaagttcagttgattcactgtttgtctccctccacaaaccaacctcttgcatcagatgttctccttaacttgcttagaggcctgccatttctttggatttttttttccattttatcacctgaaacctcatttccatcttaagtaggcctcccatgcattgtctaagtatctccctaataattcccaacattttcttgtcccaactgcagcctagttctctctttaatagaattgttttacatccctctcttgttgcagatatgatttctctccaactccgtatgtaaaaaagataaggtgaaaagaggatattgtgagcaactcagtttcccttgccacttcccagattggtagtccaaccccttctctgtgtctattccctccagccatgctactattaatttattcttgtggtctccttgtatattcacagaggactttgcgttgtggctcatagtcttcttgttcaccataatttatgacatcatgagggctccttaagttttcttgagccttttggtattaacgtctgtcaatcccattctgctttagcaaactcactgtctgccatcacttctgggttttcttcctttgtttcctttgttctgcctggaactcactgcctttccaacattttcattgtctttatcccattctgcatctgtaccattatccctaaaacttgtcttcatctaataatttacttggctagtactatcctgagaagtctattagaactgctactacaaatttatggtcttaacttttttttttttattattatacattaagttttagggtacatgtgcacattgtgcaggttagttacatatgtatacatgtgccatgctggtgcactacacccactaactcgtcatctagcattaggtatatctcccaatgctgtccctcccccctccccccaccccacaacagtccccagagtgtgatattccccttcctgtgtccatgtgatctcattgttcaattcccacctatgagtgagaatatgcggtatttgttttttgttcttgcgatagtttactgagaatgatgatttccaatttcatccatgtccctacaaaggacattaactcatcattttttatggctgcatagtattccatgttgtatatgtgccacattttcttaatccagtctatcattgttggacatttgggttggttccaagtctttgctattgtgaataatgccgcaataaacatacgtgtgcatgtgtctttatagcagcatgatttatagtcctttgggtatatacccagtaatgggatggctgggtcaaatggtatttgtagttctagatccctgaggaatcgccacactgacttccacaatggttgaactagtttacagtcccagcaacagtgtaaaagtgttcctatttctccacatcctctccagcacctgttgtttcctgactttttaatgattgccattctaactggtgtgagatggtatttcatagtggttttgatttgcatttctctgatggccactgatgatgagcattttttcatgtgttttttggctgcataaatgtcttcttttgagaagtgtctgttcatgtccttcacccactttttgatggcgttgtttgtttttttcttgtacatttgtttgagttcattgtagattctggatattagccctatgtcagatgagttggttgcaaaaattttctcccatgttgtaggttgcctgttcactctgatggtagtttcttttgctgtgcagaagctctttagtttaattagatcccatttgtcaattttgtcttttgttgccattgcttttggtgttttagacatgaagtccttgcccatgcctatgtcctgaatggtaatgcctaggttttcttctagggtttttatggttttaggtctaacgtttaaatctttaatccatcttgaattgatttttgtataaggtgtaagggagggatccactttcagcttcctacatatggctagccagttttcccagcaccatttattaaatagggaatcctttccccattgcttgtttttctcaggtttgtcaaagatcagatagttgtagttatgcggcgttatttctgagggctctgttctgttccattgatctatatctctgttttggtaccagtaccatgctgttttggttactgtagccttgtagtatagtttgaagtcaggtagtgtgatgcctccagctttgttcttttggcttaggattgacttggcaatgcgggctcttttttggttccatatgaactttaaagtagttttttccaattctgtgaagaaaatcattggtagcttgatggggatggcattgaatctgtaaattaccttgggcagtatggccattttcacgatattgattcttcctacccatcagcatggaatgttcttccatttgtttgtatcctcttttatttccttgagcagtggtttgtagttctccttgaagaggtccttcacatcccttgtaagttggattcctaggtattttattctctttgaagcaattgtgaatgggagttcactcatgatttggctctctgtttgtctgttgttggtgtataagaatgcttgtgatttttgtacattgattttgtatcctgagactttgctgaagttgcttatcagcttaaggagattttgggctgagacaatggggttttctagatatacaatcatgtcatctgccaacagggacaatttgacttcctcttttcctaattgaataccctttatttccttctcctgcctaattgccctggccagaacttccaacactatgttgaataggagtggtgagagagggcatccctgtcttgtgccagttttcaaagggaatgcttccaggttttgcccattcagtatgatattggctgtgggtttgtcatagatagctcttattattttgaaatacgtcccatcaatacctaatttattgagagtttttagcatgatgggttgttgaattttgtcaaaggctttttctgcatctattgagataatcatgtggtttttgtctttggctctgtttatatgctggattacatttcttgatttgcgtatattgaaccagccttgcatcccagggatgaagcccacttgatcatggtggataagctttttgatgtgctgctggattcggtttgccagtattttattgaggatttttgcatcaattttcatcaaggttattggtctaaaattctcttttttggttgtgtctctgcctgactttggtatcaggatgatgctggcctcataaaatgagttagggaggattccctctttttctattgattggaatagtttcagaaggaatggtaccagttcctccttgtacctctggtagaattcggctgtgaatctatctggtcctggactctttttggttggtaaactattgattattgccacaatttcagctcctgttattggtctattcagagattcaacttcttcctggtttagtcttgggagagtgtatgtgtcgaggaatttatccatttcttctagattttctagtttatttgcgtagaggtgtttgtagtattctctgatggtagtttgtatttctgtgggatcggtggtgatatcccctttatcattttttattatgtctatttgattcttctctctttttttctttattagtcttgctagcggtctatcaattttgttgatcctttcaaaaaaccagctcctggattcattgattttttgaagggttttttgtgtctctatttccttcagttctgctctgattttagttatttcttgccttctgctagcttttgaatgtgtttgctcttgcttttctagttcttttaattgtgatgttagggtgtcagttttggatctttcctgctttctcttgtgggcatttagtgctataaatttccctctacacactgctttgaatgcgtcccagagattctggtatgttgtgtctttgttctcattggtttcaaagaacatctttatttctgccttcatttcgttatgtacccagtagtcattcaggagcaggttgttcagtttccatgtagttgagcggctttgagtgggattcttaatcctgagttctagtttgattgcactgtggtctgagagatagtttgttataatttctgttcttttacatttgctgaggagagctttacttccaagtatgtggtcaattttggaataggtgtggtgtggtgctgaaaaaaatgtatattctgttgatttggggtggacagttctgtagatgtctattaggtctgcttggtgcagagctgagttcaattcctgggtatccttgttgactttctgtctcgttgatctgtctaatgttgacagtggggtgttaaagtctcccgttattaatgtgtgggagtctaagtctctttgtaggtcactcaggacttgctttatgaatctgggtgctcctgcattgggtgcatatatatttaggatagttagctcttcttgttgaattgatccctttaccattatgtaatggccttctttgtctcttttgatctttgttggtttaaagtctgttttatcagagactaggattgcaacccctgcctttttttgttttccatttgcttggtagatcttcctccatccttttattttgagcctatgtgtgtctctgcacatgagatggttttcctgaatacagcacactgatggatcttgactctttatccaatttgccagtctgtgtcttttaattggagaatttagtccatttatatttaaatttaatattgttatgtgtgaatttgatcctgtcattatgattatagctggtgattttgctcgttagttgatgcagtttcttcctagtctcgatggtctttacattttggcatggttttgcagtggctggtaccggttgttcctttccatgtttagtgcttccttcaggagctcttttagggcaggcctggtggtgacaaaatcggtcagcatttgcttgtctgtaaagtattttatttctccttcacttatgaagcttagtttggctggatatgaaattctgggttgaaaattcttttctttaagaatgttgaatattggcccccactctcttctggcttgtagggtttctgccgagagatctgctgttagtctgatgggcttccctttgagggtaacctgacctttctctctggctgcccttaacattttttccttcatttcaactttggtgaatctgacaattatgtgtcttggagttgctcttcttgaggagtatctttgtggcgttctctctatttcctgaatctgaacattggcctgccttgctagattggggaagttctcctggataatatcatgcagagtgttttccaacttggttccattctccccatcactttcaggtacaccaatcagacgtagatttggtcttttcacatagtcccatatttcttggaggctttgctcatttgtttttattcttttttctctaaacttcccttctcgcttcatttcattcatttcatcttccattgctgataccctttcttccagttgatcgcattggctcctgaggcttctgcattcttcacgtagttctcgagccttggtttgcagctccatcagctcctttaagcacttctctgtattggttattctagttatacattcttctaaatttttttcaaagttttcaacttctttgccttcggtttgaatgtccttccatagctcagagtaattcgatcgtctgaagccttcttctctcagctcgtcaaagtcattctccatccagctttgttctgttgctggtgaggaactgcgttcctttggaggaggagagacgctctgtgttttagagtttccagtttttctgttctgttttttccccatctttgtggttttatctacttttggtctttgatgatggtgatgtacaggtgggtttttggtgtggatgtcctttctgtttgttagttttccttgtaacagacaggaccctcagctgcaggtctgttggaataccctgctgtgtgaggtgtcagtgtgcccctgctggggggtgcctcccagttaggctgctcgggggtcaggggtcagggacccacttgaggaggcagtctgcaggttctcagatctccagctgtgtgctgggagaaccactcctctcttcaaagctgtcagacagggacatttaagtctgcagaggttactgctgtctttttgtttgtctgtgccctgcccccagaggtggagcctacagaggcaggcagacctccttgagctgtggtgggctccacccagttcgagcttcctagctgctttgtttacctaagcaagcctgggcaatggcggacgcccctcccccagcctcgctgctaccttgcagtttgatctcagactgctgtgctagcaatcagcgagattccgtgggcataggaccctccgagccaggtgtgggatatagtctcgtggtgcgccgttttttaagccggtctgaaaagcgcaatattcgggtgggagtgacccgattttccaggtgcgtccgtcacccctttctttgactcggaaagggaactccctgaccccttgcgcttcccaggtgaggcaatgcctcgccctgcttcggctcgcgcacggtgcgctcacccactggcctgcgcccactgtctggcactccctagtgagatgcacccagtacctcagatggaaatgcagaaatcacccgtcttctgcgtcgctcacgctgggagctgtagactggagctgttcctattcggccatcttggctcctcctggtcttaacttttatgaactcttatacagccacttgtccaattttccaaaacagcaattctaaacttttctctccagctaattattaaacttaatatcctatcctgatgctattggaagattgtcactccagagac

SEQ ID NO: 2831 - DNA, 6181 bp, Homo sapiens
tttatggtcttaacttttttttttttattattatacattaagttttagggtacatgtgcacattgtgcaggttagttacatatgtatacatgtgccatgctggtgcactacacccactaactcgtcatctagcattaggtatatctcccaatgctgtccctcccccctccccccaccccacaacagtccccagagtgtgatattccccttcctgtgtccatgtgatctcattgttcaattcccacctatgagtgagaatatgcggtatttgttttttgttcttgcgatagtttactgagaatgatgatttccaatttcatccatgtccctacaaaggacattaactcatcattttttatggctgcatagtattccatgttgtatatgtgccacattttcttaatccagtctatcattgttggacatttgggttggttccaagtctttgctattgtgaataatgccgcaataaacatacgtgtgcatgtgtctttatagcagcatgatttatagtcctttgggtatatacccagtaatgggatggctgggtcaaatggtatttgtagttctagatccctgaggaatcgccacactgacttccacaatggttgaactagtttacagtcccagcaacagtgtaaaagtgttcctatttctccacatcctctccagcacctgttgtttcctgactttttaatgattgccattctaactggtgtgagatggtatttcatagtggttttgatttgcatttctctgatggccactgatgatgagcattttttcatgtgttttttggctgcataaatgtcttcttttgagaagtgtctgttcatgtccttcacccactttttgatggcgttgtttgtttttttcttgtacatttgtttgagttcattgtagattctggatattagccctatgtcagatgagttggttgcaaaaattttctcccatgttgtaggttgcctgttcactctgatggtagtttcttttgctgtgcagaagctctttagtttaattagatcccatttgtcaattttgtcttttgttgccattgcttttggtgttttagacatgaagtccttgcccatgcctatgtcctgaatggtaatgcctaggttttcttctagggtttttatggttttaggtctaacgtttaaatctttaatccatcttgaattgatttttgtataaggtgtaagggagggatccactttcagcttcctacatatggctagccagttttcccagcaccatttattaaatagggaatcctttccccattgcttgtttttctcaggtttgtcaaagatcagatagttgtagttatgcggcgttatttctgagggctctgttctgttccattgatctatatctctgttttggtaccagtaccatgctgttttggttactgtagccttgtagtatagtttgaagtcaggtagtgtgatgcctccagctttgttcttttggcttaggattgacttggcaatgcgggctcttttttggttccatatgaactttaaagtagttttttccaattctgtgaagaaaatcattggtagcttgatggggatggcattgaatctgtaaattaccttgggcagtatggccattttcacgatattgattcttcctacccatcagcatggaatgttcttccatttgtttgtatcctcttttatttccttgagcagtggtttgtagttctccttgaagaggtccttcacatcccttgtaagttggattcctaggtattttattctctttgaagcaattgtgaatgggagttcactcatgatttggctctctgtttgtctgttgttggtgtataagaatgcttgtgatttttgtacattgattttgtatcctgagactttgctgaagttgcttatcagcttaaggagattttgggctgagacaatggggttttctagatatacaatcatgtcatctgccaacagggacaatttgacttcctcttttcctaattgaataccctttatttccttctcctgcctaattgccctggccagaacttccaacactatgttgaataggagtggtgagagagggcatccctgtcttgtgccagttttcaaagggaatgcttccaggttttgcccattcagtatgatattggctgtgggtttgtcatagatagctcttattattttgaaatacgtcccatcaatacctaatttattgagagtttttagcatgatgggttgttgaattttgtcaaaggctttttctgcatctattgagataatcatgtggtttttgtctttggctctgtttatatgctggattacatttcttgatttgcgtatattgaaccagccttgcatcccagggatgaagcccacttgatcatggtggataagctttttgatgtgctgctggattcggtttgccagtattttattgaggatttttgcatcaattttcatcaaggttattggtctaaaattctcttttttggttgtgtctctgcctgactttggtatcaggatgatgctggcctcataaaatgagttagggaggattccctctttttctattgattggaatagtttcagaaggaatggtaccagttcctccttgtacctctggtagaattcggctgtgaatctatctggtcctggactctttttggttggtaaactattgattattgccacaatttcagctcctgttattggtctattcagagattcaacttcttcctggtttagtcttgggagagtgtatgtgtcgaggaatttatccatttcttctagattttctagtttatttgcgtagaggtgtttgtagtattctctgatggtagtttgtatttctgtgggatcggtggtgatatcccctttatcattttttattatgtctatttgattcttctctctttttttctttattagtcttgctagcggtctatcaattttgttgatcctttcaaaaaaccagctcctggattcattgattttttgaagggttttttgtgtctctatttccttcagttctgctctgattttagttatttcttgccttctgctagcttttgaatgtgtttgctcttgcttttctagttcttttaattgtgatgttagggtgtcagttttggatctttcctgctttctcttgtgggcatttagtgctataaatttccctctacacactgctttgaatgcgtcccagagattctggtatgttgtgtctttgttctcattggtttcaaagaacatctttatttctgccttcatttcgttatgtacccagtagtcattcaggagcaggttgttcagtttccatgtagttgagcggctttgagtgggattcttaatcctgagttctagtttgattgcactgtggtctgagagatagtttgttataatttctgttcttttacatttgctgaggagagctttacttccaagtatgtggtcaattttggaataggtgtggtgtggtgctgaaaaaaatgtatattctgttgatttggggtggacagttctgtagatgtctattaggtctgcttggtgcagagctgagttcaattcctgggtatccttgttgactttctgtctcgttgatctgtctaatgttgacagtggggtgttaaagtctcccgttattaatgtgtgggagtctaagtctctttgtaggtcactcaggacttgctttatgaatctgggtgctcctgcattgggtgcatatatatttaggatagttagctcttcttgttgaattgatccctttaccattatgtaatggccttctttgtctcttttgatctttgttggtttaaagtctgttttatcagagactaggattgcaacccctgcctttttttgttttccatttgcttggtagatcttcctccatccttttattttgagcctatgtgtgtctctgcacatgagatggttttcctgaatacagcacactgatggatcttgactctttatccaatttgccagtctgtgtcttttaattggagaatttagtccatttatatttaaatttaatattgttatgtgtgaatttgatcctgtcattatgattatagctggtgattttgctcgttagttgatgcagtttcttcctagtctcgatggtctttacattttggcatggttttgcagtggctggtaccggttgttcctttccatgtttagtgcttccttcaggagctcttttagggcaggcctggtggtgacaaaatcggtcagcatttgcttgtctgtaaagtattttatttctccttcacttatgaagcttagtttggctggatatgaaattctgggttgaaaattcttttctttaagaatgttgaatattggcccccactctcttctggcttgtagggtttctgccgagagatctgctgttagtctgatgggcttccctttgagggtaacctgacctttctctctggctgcccttaacattttttccttcatttcaactttggtgaatctgacaattatgtgtcttggagttgctcttcttgaggagtatctttgtggcgttctctctatttcctgaatctgaacattggcctgccttgctagattggggaagttctcctggataatatcatgcagagtgttttccaacttggttccattctccccatcactttcaggtacaccaatcagacgtagatttggtcttttcacatagtcccatatttcttggaggctttgctcatttgtttttattcttttttctctaaacttcccttctcgcttcatttcattcatttcatcttccattgctgataccctttcttccagttgatcgcattggctcctgaggcttctgcattcttcacgtagttctcgagccttggtttgcagctccatcagctcctttaagcacttctctgtattggttattctagttatacattcttctaaatttttttcaaagttttcaacttctttgccttcggtttgaatgtccttccatagctcagagtaattcgatcgtctgaagccttcttctctcagctcgtcaaagtcattctccatccagctttgttctgttgctggtgaggaactgcgttcctttggaggaggagagacgctctgtgttttagagtttccagtttttctgttctgttttttccccatctttgtggttttatctacttttggtctttgatgatggtgatgtacaggtgggtttttggtgtggatgtcctttctgtttgttagttttccttgtaacagacaggaccctcagctgcaggtctgttggaataccctgctgtgtgaggtgtcagtgtgcccctgctggggggtgcctcccagttaggctgctcgggggtcaggggtcagggacccacttgaggaggcagtctgcaggttctcagatctccagctgtgtgctgggagaaccactcctctcttcaaagctgtcagacagggacatttaagtctgcagaggttactgctgtctttttgtttgtctgtgccctgcccccagaggtggagcctacagaggcaggcagacctccttgagctgtggtgggctccacccagttcgagcttcctagctgctttgtttacctaagcaagcctgggcaatggcggacgcccctcccccagcctcgctgctaccttgcagtttgatctcagactgctgtgctagcaatcagcgagattccgtgggcataggaccctccgagccaggtgtgggatatagtctcgtggtgcgccgttttttaagccggtctgaaaagcgcaatattcgggtgggagtgacccgattttccaggtgcgtccgtcacccctttctttgactcggaaagggaactccctgaccccttgcgcttcccaggtgaggcaatgcctcgccctgcttcggctcgcgcacggtgcgctcacccactggcctgcgcccactgtctggcactccctagtgagatgcacccagtacctcagatggaaatgcagaaatcacccgtcttctgcgtcgctcacgctgggagctgtagactggagctgttcctattcggccatcttggctcctcctggtcttaacttttatgaactcttatacagccacttgtccaattttccaaaacagcaattctaaacttttctctccagctaattattaaacttaatatcctatcctgatgctattggaagattgtcactccagagac

SEQ ID NO: 2832 - DNA, 425 bp, Homo sapiens
aataaccaaccaacattttaacttctcttattttcttccttttttccttccttttcttgttacttttcaaagtgcaagtaaccaatattatggaatgtctaccttatgcatggtgcagtgccaggcaatgggtatgtagtagttaaataggcaggaattagaacaaaaaaaaaaaaagaggaaacaagatgaatttgagggggtgctttgagagggcatgagagcagctataatatgtgctctggttaggagaagaaaaacatagtatttttaagatactgttggagactagtgaccttttcttaacgtttaaaaatataacaagagagtcagttttttctgattcttcatgtcctaagacacaagaatctcttgggcaaggtaggatcctccttggaggacagaaattagaaagtctgaatcag

SEQ ID NO: 2833 - DNA, 17758 bp, Homo sapiens
cgggcctgggcttgggcctgagcctcattttcatcgctgtctacctcatccgcttctgctgctgccggccccccgagccccccgggtccaagatcccctcgcccgggggaggctgcgtcacctggagctgcattgtcgcccttctcgccggctggtaatggggccccagggtgggtgggcggtggggacagggctccccaagctctttgctggccttcctgggggtgtcctccggggacatggaggaagcagacaggaaggaggaaactccctcgtccctgtccctgccatttgcaagcccacttcagcgcacagcaggaaggactgtcccatttgatggatggagaaagtgaggctctggagaggaagtgaatcaagggcagccatctggtgagaaggcgcaggggcagtcagatggcctggttttggtggctctcccattgaatagctgtgtgacctaagggagtgatagtctccctgggcctcaatttccacatctgtaaactgggcattatcatctcgcccacctcctgcgggggtaagatggagagaaagcacagtgtctgacttgcagctactctcagccaacattaactggtgatgtctgtcattccgtcattcaccagctcattcattcgacaactgtttattgagtatttactatgtgccagatactgaccaagccaggcaaggagcccctcgtgcagcttatgttctaatcagggagacggacgataaatagatataatcaccctccaagagcacctcatctgtgcccagacctgagctggtctaattccttctcacaataatgctgctggattcaggggtgtcaggcccagtttccaaagaggaaggctcagggacagaggggaggtcacctttcaaggccacgtggcttaagaggcagcacagagattcagacccaggttagtaggaccccctcacacccctcaaagcgagcttagggggcttccaatgtgaacacaccagctaccaagaacgagctctgagcacagccccctccccggcagggcagcacccacaggttacagacagcaatcctcttccacagacggggggtcccagagggccagacgcctgccccggacccacagcgggcaaggggagggacctgtaggggtggcctgtattcaggacgcttcctcctccggctctctggcgtggggggagacaggggaggtggacaaaggcccagtgggggagagacacggccccagcccccgcagcctgggaacaagaggagctttgtaggactctgaacaatggggcggggacactgggcgtccgacccgagggatgggggtggaggcccagccggggctgggaaccgggagggtgtcaggctcccgccccctccactgcgggacaccggccgggggcggggacgggaggggtctggggccccacattcaggtcccacaatggagctctgtgtgtcggtagggtgggggcgggggcacggcttctcgcccatcctccagcctccctcccacattcccttacttccctcccagctggcccgacgcttgggtcccgggtgggggaaggccgagagctccaggctcagcgtccccccaggagatggtggcagctgccccccttgtacccttaggaacccccaggaggtgggggcggagaacgtctcagcactgaagggttggcactgcaggccccaaggaccctagggcaccctaggacaggtgccaggagggctgcctgcctggcaaaggatgcgggggaagggtgtggggcaggcagtcctagggaggggaagacggcccatcccggagctgggtgtgactggggttctgctccagggaggtgcgagttaaatcgggggctccctcccccccaccactccacccaccattaacatcacaatgacgtccctccgctgggggagtgaggccttcccgttcccttggcaaccgacgggggccaggctgaagtcgcccttttcccacgggctggcccaatgaggtggggctgagatgggaggggtggataagaaggcgaggtggaggggatggggtgggaggggacggtggcccccggggtcctgggacccgctgagattcctctccctcctcctccgctcagcactggcattggcatcggtttctatggcaacagtgagaccagtgatggggtgtcccagctcagctctgcgctgctgcacgccaaccacacactcagcaccattgaccacctggtgaggggccagcaaccagtgggaccccagacccacacctggacgggctccccacacccaaggacaaagggatccaaactcagagctaagaccccaggcttgaagcttaggaacccagattcagaacttcatcctgagacccacagacctcagactatccacccaacccccgaccctggctgcaaattgaggacctcacacacaggcccagccctggaccttacctggaacccccaagccacacagaaaccaagcaccagcgacaccagcccctgtccacgggccagatccagggccccagacctgattcttggcccgtaagcaagctcagggacccccgccctgaggcccaggtccccgacttgaggcttcagctccgacatcagctccaggattctgggccctggggctgaggcctggccccacttcatgccttagattccatgtccagctgcagactctagaccatgggacccagacttgagaccccagattctggaaggcagatgaaaacttcagacctaaagctccacacttaatctcagtcctggggctggacttactaccctgggctcaagctaccaaccatccagagctctggatagaggccacagaactccatgaacttgatcttgaagcccctccccaatcccttcccttactcaatcctcagatgtcccagactccagatctcagacacccgctactatgcacccctccttcacttctaaaaccccatgcctcgaccgcgggctccccccaggatgtccttccagacctcagcccctgtcctatccccaggtgttggagacggtggagaggctgggcgaggcggtgaggacagagctgaccaccctggaggaggtgctcgagccgcgcacggagctggtggctgccgcccgaggggctcgacggcaggcggaggctgcggcccagcagctgcaggggctggccttctggcagggagtgcccctgagccccctgcaggtggctgaaaatgtgtcctttgtggaggagtacaggtgagacgctgctcttcttgctctctgtgccggcagctctcaggcggagtccccggggggacagttggcaatgcctggaggcagttttggttgtgacagctggggagtgtgtgcgcactgctggcatccaatgggtagagcccaggaactgttcaacaccctgcaatgcacaagaaccccctccccacccattggcagggaatgatccagccaccatgacaattatgacgaggctggccaggcgcggtggctcaggcctgtaatcccagcacttttaggaggccaaggtgggtggatcacctgaggtcaggagtttgagaccagcctggccaacgtggagaaaccccgtctctaccaaaaatacaaaaattagctgggcgtggcggcagatgtctgtaatgccagctactcaggaggctgaggcaggagaatcccttgaacccgggaaatggaggttgcagtgagccgagatttcaccattgcactccagcctgggcgatagagtgagactccatctcaaaaaaaaaaaaaaaaaaaaaaaaaagatgaggttgagaaacctactgtggagggacagatcaccagaccccatggccatcctgacacccatgtcctcacccattcactcactcaccccctccacgtcactccactcacttattcacacatgcgttcattccttgactcactcattcagcaagtcactcttggactcagttactcctggactaacccagcaggccactcactcagttcgttcatccgtgtgacatgtgtatttgttcagcactatttttttttttttttttgagatggagtctcactctgtcgcccaggctagagtgcagcggtgcgatctcgactcactgcaacctccgcctcctggattcaagcgattctcctgccgcagcctcccaagtagctggcattacaggcaggcgccaccacgcccggctaatttttgtatttttagtagaaacggggtttcaccatgttagccaggctggtctcaaactcctgaccttgtgatctgcccgccttggcctctcaaagtgttgttcagcactatttatttagcaccctctggtgaaagaggcagcgtacctacagatcaggaacctgagctcgaaagccagccagccccaccctaaccacgcggctgcaatcaagttactttgcagacctctgccttggtttccccatctgtgaaatgggaatcggggcagcgtcccccttgttgaattggttcgagttgttgagttggcatctgagtgctgagaaggacgattagcacagggagagcaccgcagagatatgaagtgtagtcaccccggtggcgggccgggcagtgagcaagtggcagaaatccctgccacgtggctgcgtcctccggggggaaccagcaagggacaaacgcagagaaaaacattgtaaggtgttgggccatgagaactttggagaaaattacagaggggaccaggcacggtggttcacgcctgtaatcccagcactttgggaagccgaggcaggcggatcacgaggtcaagagatcgagaccatcctggctaacacggtgaaatcccgtcgctactaaaaatacaaaaattagccgggcgtggtggtgggcgcctgtagtcccagctacttgggaggctgagacaggagaatcgcttgaacccgggaagtggagcttgcagtgagcagagatcgtgccactgcactccagcctgggtgacggagcgagaatccgtcttaaaaaaaaaaaaagaaaattatagagggagatgaggtgggacagagtctggcagttcatcagggggactgagaaggtggcatttggaggagaggaggcagtgagctgtgcagtgtccaggcagccacccttcccagcggccaccatgacggtgtcctcattgctttgaccattagtaatcattcattcattcattcatttatccgacgtcagctggaggccctgcccgcggggcatgcgctgagatttgggaggccttccgggatgctgcgctccagcggggaaggccgactggggctgaaaaagctggaggtcaggacacacccgcagggcagcaggtgcaagagacagacaagcctgggtttgaagaagtccaggttctgcattgtggtcaggcccaggggctgcacaagccgggcctcagctccttctcctgggcgagggcagggaagtggtgggagccataagggtgatgccagggtgaggcagacccaccatcgctagaaaatatcttccgggtgcaccactgcgaaagcaccccacacttgggagtccctcgacagacaaatcaggggcctccaagggagtcttgctggaggggagcacttgcgaggctgggcggaagcagccagagaccagggtaaggagtgaagcccaagcttgtggggcctgcagagaatggcaggaggattacatgagcacttactacgtgccgggcactgtgctgttgttacggcgggtccttgctcccggagctcccaagatcgtggtggccacttccaagagggcagcaagcctcgtgttctctgacctggggttcttggcctcacggattccaaggaatggaatcctgggccctgcggtgagtgttttagctctattagaagccgtgggtcacggaagagaaccgtggaacccagcgaccagtgttcagctcgatcaggatgaacccaggcagttagctgtgcaggaacaatggcgagcctctagcccgattgggagcggcaatgggtgtctccctggatcacgagcacagtggacaccctgccggatccggagggtggaagtcagcggcgggtctgcgacggcggcaaacagcagtggtggacggcgagcgaaagctcagctcaagccgtaacagacacggaccagaagagtgtgcagtttcaagttttaatagagtgaaaacagagttcccatacaacgggaggggacccaaagtgggtagccgttgctggctggaatgcctgggtttctatccagatcattgtcccttcccctgtgctctcaggtgatagatgattggctatttctttacttcctatttttgcctaactagcactttagtgagctctctttactacctgattggttgggtgtgagctaaattgcatgccccgtgtttaaaggtggatgcggtcaccttcccagctaggcttagggattattagtcggcctcggacatccagctagtcctgtctctcactgtggcttgcatgcttgcacctcctgaatcatggtggtgggcccttcactgatatttaaggattaacttttttttttttcatttttgagactaagtctcactcttgtcgcccaggctggagtgcagtggtgcaatcttggctcactgcaacctccacctcatgggttcaaatgattctcctgcctcagcctcccaagtagctgggattacaggcgtgcaccaccacgcccggctaattgttgtatttttagtaaagacggggtttcaccatgttggccaggctggtctcaaactcctgacctcaagtgatccgcctgcctcagcctcccaaaatgcgcggattacaggcgtgagccacctcgcccggccaagtattaactattaactaacatctcagttccctcgttcacgctcaggctaacctctaagtgtgtccacgtgcttggcactctcctaagcacttctagtcatgcagcccactcgaggcaatattctcaagccagtgttgttgtgctccccacgttacatgtagggaaactgaggaacgagaggctaaggttaccgagacaagagttacccggccagttaagcggaggggctggggttgagaccaggcagcctctgcctccagacgtcatgccctccagggatgcgatgggatctttggtgcagtcttgagaacgagtatctccactctgcagggtggggttggggatggggagctcggagagaacacatcacgtgtccctggtcacagggcacatgtgtgtggcccggccaggggatagtcccaggtgctcaggacctgtattctaaaccgctccagtgtcctgtctcatgataacactatttcacagaggacctgggctgtggcccagacacagtaaacagcaggaggctgagcttggagggtggtgaatgtgaggctgagctggggggcagggtgaatgctggtggagggttgctgttccgccggggtgcctggaggcaggtttgtggtttcagccctaccctctcccctcccaggtggctggcctacgtcctcctgctgctcctggagctgctggtctgcctcttcaccctcctgggcctggcgaagcagagcaagtggctggtgatcgtgtaagtgcaggcagtagggggacccagtgcttgcctggcactctcctggcaggcaggacctcagtcttacaactctcctacacggaggaccgtggtccttcacggccgggtacacacgaagaaaagagagtcagagcagcccaggagggaggcggggacagacctgaaaacaggcagccctaacagtatgaagtatgctggaatcatggcagaaataatcattgtgttggcaataaagatgaggatgaggccaggcgcggtggctcacgcctgtaatcccagcactttaggaggccgaggtgggtggatcatgaggtcaggagtttgagaccagcctgaccaacatggagaaaccctgtctctattaaaaatacaaaaattagctgggtgtggtggcatgcgcctgtagtcccagctactcaggaggctgaggcaggagaatcgcttgaactcaggaggtggaggttgtggtgagccaagatcacaccattgcactccagcctgggcgacagagtgacactccatctcaaaaaaaaaaaaaaaaaaaaaaaaggctgggcgtggtggctcacgcctgtaatcccagcactttgggaggccgaggagggcggatcacgaggtcaggagatcgagaccatcctggctaacacggtgaaaccccatctctactaaaaatacaaaaattagccgggcgtggtggcgggcgcctatagtcccagctactcgggaggctgaggcaggagaatcgcttgaacccgggaggcggaggttgcagtgagctgagattgcaccactgcactccagcctgggcgacacagtgagactccatttcaaaaacaacaacaacaacaacaaaaaaaaacagatgaggatgatgatctattgagggtcatgcacgctgagtccttcagttgcctccaccccatgaaggagctaccataaggctccatgtggccggtcagggacctgactaagagcgcagagggtggccaagtccgagactgagccgtccttaagtgtcgtggcaaagccgcaggaccacactgatttcacagctcgctctacgcgcccgacactcttctctgcactccctggagcacctcatgccccctgtgaggaaggtgcttccttctgcctgttttttatttctgttttttattttgagaaggtcttgctttgttgcccagactggagtgcagtggcatgatcacggctcactacagcctctgtcccctgaggctcaagtgatccccccacctcagcctccagagtagctgggaccatgggcttatgccaccactcccggctaagttttttttttttttttttttttttttttgagctgcaatttggctcttgttgtccaggctggagttcagcggcacgatcttggctcactgcaacctctgcctcctgggttcaggcaattctcctgcttcagcctcccaagtagctgggattacaggcgtatgccaccaaacctgtctaattttgtatttttagtagagatggggtttctccatgttggtcaggatggtctcaaactcctgacctaaggtgatccgcccgcctcagcctcccaaagtgcctggattacaggcatgagccaccgtgcctggcctaagttttgtatatttttgtagagatggagtcttgctatgttgcccaggctggtctcgaactcctggcctcaagtgatcagcctgcctcagccttccaaagtactgggtttacaggcatgagctaccatgcctggcccttctccctgtttaacagagggagagactgaagatcagagaggttggaccacttgctcagggccacacagctagaagtgctagagctgggatttgaaccagacaggccattctcattggaggagtccctgcattctctctggccctagtggggtgaggcggagttgaacctgtacctccattgcccctgagagagtgggagagaccccgcgtaaggcttgcagacccataaacctagccaacacagggcaggtctgggactggaagccaggccttcagtttggggacccctgggtgcccttcttgcttactggtcaccctaccaatgctgacacgccccctgcacccctccccacccggaaagtccagagactttcagatttcagccctggcactgtctcccattctcagaggagacagggcagagccagaggctgatcaggctgtgggtggacttgggggagccttcgggggaagtgagcccagaggtgagcagtcaccgtcccagggtcctggagctgggatccaagctgcgaccacccagcccagggccctgctcataccccacaccctgctcatctgggcaggagccagatgtcctgctggacatcagcagccactggcctacccccaaccactgaacttgtgtttccctaattctgatcctccaggctccagaggtgggtggaggtggggggcggctgtgatgggatttggggtgtggaaagaggctaggctaggagattaagaaccccgggctgatcctccctcccccactctaggatgacagtcatgagtctcctggttctcgtcctgagctggggctccatgggcctggaggcagccacggccgtggtgagtgccagggccgggccattgggctctgggactcagggggcctggagacttcaacttctggatctcgggatggcatggcttagtagagaaaggaattggggggcacgatcacagctctgaggtttagggcttgtttcctggggcctgagtgggtacagattggtgtcctggacgtttgagctgtaatggaggaggggctggaaacctggattcctaggtctgagggaggaggggctgggggtctggactcctgggtgtgagggaggagaagctgggggcctggactcctgagtctgagggagaaagggctggagagtctgaacccctgagtctgagggacgaggggcctggggcctggactcctgagtctgagggaagaggggctgggacctggacccctgggtggggaggggagctggggagccaggcactgggtgctgtgggagtgtggaatcggggcagttttgggtttgagccccttttctgctgcctcacgcagggcctcagtgacttctgctccaatccagacccttatgttctgaacctgacccaggaggagacagggctcagctcaggtgatttccaagggcccggtgggtccgccgggttgggcagtgcaggccctggcttcctcaggcctcctctgtgcccggtcctgcccagggtggggtgggggtgcagcctgccaggcgagacccagccctctggaagggaagcagggctcctggccactccccagctcggagccctcctggagccccgccacccgccagaccctcatcccttctgctccagctggcagcgcctctcctggtgggctggaaaagagggcaggataaagataatggtgccaggaagagagaggagggtcaggagagggtgctcctgggcgtcaggaatggggagtttggccccctggagaaaactggggagcaccatttagtcaggggttcccagggagtatagggttgcccaccagcgcctgctctggctgtggcaggagcagaagggacgcggggctggcgggtctctgaaggtaaggccatcgggctccagggctgggctgaggcccctaaccctgctaaccccccagtgcccggccttcccccgggagatccctgggggcccaggctcatggcctcctcccctctcctcctcccacttcagacatcctgagctattatctcctctgcaaccgggccgtctccaaccccttccaacaggttagggctgcgggcaggggaaacgggtgttgagggagccagaaatctggactctgaagggagggggcggggctggggctggggcctggactcctgggttccggggaggatgcaggccaggggcccgagtgctgtgtccggaggagaggagagagggccgggggcgtatactcctgggtcctcctccctccctttctctttctgcagaggctgactctgtcccagcgagctctggccaacatccactcccagctgctgggcctggagcgagaagctgtgcctcagttcccttcagcgcaggtcggtgggtgggcgctccccagacacgcggaccccacggggaaggcggacggggcgggatggagctgtggggcgtaggcggggctgcagagctaggcggggccttgggttgtgggcggggacgcagggcggggccagggcgatgggcgggcctgaagagttcgtgggaaaacgacccctcctcgccccgcagaagcctctgctgtccttggaggagactctgaatgtgacagaaggaaatttccaccagttggtggcactgctacactgccgcagcctgcacaaggtgaagcccctcccctcccaatttcttctcccacggggggcctctgtctcgacccacagaactacctcctccttctccttggacccctgccattgcgcctgaggatatctctgtatcctctgtttatatgatttatctgtcctatatctattctctacctatttataacctgtcgtctacctacctatcaagcattatccatattccttccctcctccctccctttccccccaactcccgcactccccgctgggtccccatcccaccctccccgtcccttcctgccaccttttccttccttgtcttctctcctctctccgtcctcctgcctctccctccctcctagaggctgccgcttagtgagttctggagcaagactgcctgggttccagtcctacctcctgaccaagggcaagtcacctaacttctctgtacctcagttagttccctcacttataaacctgggattgcaagagtgggcacctgtccagctcccctgcggcttgtgctgttcatacactggacaggcaggggtgggcagggtgcccaggaggaaagatatctggtgtcctgcaggctccagtttgggctctgccgcaggctgcacggccataggcaggtgagcgtggctgactctgcttcccacccgtaccgtgaggaaggacgagttttttttgtttgtttttttttcactggatggctgtgaggattgaaaaaaaaaatccccttataaaacagtaggagctggccgggcgcggaggctcacacctgtaatcccagcactttgggaggcccaggcgggtggatcacctgaggtcaggagttcaagaccagtctggccaacatggtgataccccgtctctactaaaaatagaaaaagttagccgggcatggtggtgggcgcctataatcccaactactcgggaggctgaggcaggagaatcgcttgaatccacgaggcagaggttgcagtgagccaagattgtgccactgcactccagcctgggcaacaagagcgaaactctgtcacaaacaaacaaacaaaaccagtaagagctgttctaaaacacacacccgaggatgcctttccccggccagtcttcccatcaaagacctcacatgtgcatagcttcaccaagtacctgaccctgttgcatttcacaggtggtaactcatcgatgcctcataacaatgctatgaagaaggaactatgattatcccacctaacaggttagaagatgaggagcagagttgagggaccttcccaaggtcacacggccagccagcccgtgcacactgaggagagagggaccttccggagggccccgccctctgccccccacagccaggcagttgcccagttttgtcctttctgcttctggaatgtcttcatccatctactctcaatgcccaatgcccctgccgcagctgaggcctcgttctctcccctgcagaaggaagcatggccccctccccatccatccccccatggaccctagaatagggctgccagattcagcaaacagcaaaccactctgctataagtacgcccggtgcaatgctggggagatacttatactagaaaattatgtattgggcatccgatactcaaatgtaactggaagtcctgaatttgatctggcaaccctacccaagagggatttgtctacgccatcgcatggatctgagctttccctggtctggctcagacagaccccttctgtggctcccactgcctcccacccttctggaactggcattccaaaaagggagtggggagtaagcactgaagccatgctcagaattgctgactattgagctgagaaaggctgggcccccacccagcccagggctgccctgatcttttgcataaggataaactggggttcaggcgcttttctgtggcctaggcagaaactgggctggaatacaggcccccagactcctttgtggagggagggaagggaaggaagaggacagatcactctacccttccctaccactgcaccatgagaccctgggtctccatctcccctgtcagtgtgccagggtcctcacagattaaaatcaagaataagcggcggggccgggcactgtggctcacgcctgtaatcccagcactttgggaaaccaaggtgggcggatcaccagaggtcaggagtttgagaccagcctggccagcatggcgaaatcccatctctactaaaaatacaaaaaaactagccgggcgtggtggcacacccctgtattcctagctactcaggaggctgaggcacgagaattgcttgaacctgggcagtggaggttgcagtgagctgagatcgagccactgcactccagccggggtgacagagcgagaatccgtctcaaaaaaaaaaaaaaaaaataggagggggctagggatgggtgcctcgtgcctataaacccagcactttgggaggcccagtggggcagatcagaactccttgagctcaggagttcaagaccagcctggccaacatggtgaaaccccatctctattaaaaaaaaaaaaaatcaacaataagggacatcagggatgaggatgaaggagggagggcactggagcctaagagaatcagctccaatatcgcttctgccccttccagacagtgtgactctgggcaagtagcttgccttctctgggctgcaacttctttccaccattgcaagaggcggcagcgtgagagggtcagtgtctgcctggcagggctgttgtgaggatgaaggacagtgtgcatgtaccaatactctcaaaacagagcctccattgccccgacaggtccgtaccccaaccctcactggcttagtaacagacaccccacctcaaccaggtgctcctgccagaaactcaggctcttagctcccacaaccattctcagaacaagttctgttggcccttcctctgaaacctatatggactcccaccgctgttcctaccaccattgctgtgccctggtccccgcatcctagccaccatgaccacaggggcctcttccctgtcccccctcgcctacccccgtctgtcctccatgcagcagccagccagccaggtgatccttttaaaacacaatccgatcaagttcttcctctgcttaaaacgctcagtgattcccctcagacatggattaaaatccctgttcctcgccctgacctacaagggcctgggtggtcagtcctggatctgtctgcctctggcctcagcccctcccagcttcctctgcacagccctctgcctggctccttcctggaggacccatccctgctagtggggttacccgacctacccctgccctgcactgacccccgccctcctacctcgttgcacaccagcctctgagatgaccttctcggtcctgtttaccgaagtttcctggtactgggggcagcgcctggggcagagcaggctctgtcaacccccactgaatacatacgctgtgcaggtgcttagcactcggtgaaggccgtttctgctgatttcttgggacgacagtcatcagagccagcatttgttggcatgttgagtgtgtattgtgtgcgcggtgtcatcttgagccactggttggtttttcgacgtgctgttccacgtgctctaggccagtgattctgcccccagggacacctggctgggtgaggagttctgcccccagggacacctggccgggtgccgagttgctgttggttgtcacactgcaggagggggtgctcctggcatctggtgggtggagctgagtggggctgctcagcaccccacaacacacagggcagcgccgtcaccacagagaatgatctggctcaaaatgtcagcagggcccaggttatgaagccctcgcccctggaccaaggcggagctggcggtggctggcctgtgggcgcttggtgcaggggaggatgctcttgcaggaggtgccgctgccgggagggagaagggaaacggaagtagcagttctcacgttcctgggtagatgaagatggaggagagggcccagggctggtgggagatgctggactggttctagatgtggggtgctgactggggaggacccatgtgaaagggagataggggcctgcaatgacaagggcgggtgcagctcaggagaagccaagtctggaggctgggcaattaattcctgagtgccaggcctatcacaccaaagaccccactgtacccactgtattctcagaactgccctttgacaggggaaactgaggcacagagtggtcagttgacgtgtgcagtaccacagccgggaggacggtcagactgatgtgcacagtgtgtgccgatgggggagggggtggggacgcatggcctgatgacgccctcccctcaggactatggtgcagccctgcggggcctgtgcgaagacgccctggaaggcctgctcttcctgctactcttctccctgctgtctgcaggagcgctggccactgccctctgcagcctgccccgagcctgggccctcttcccacccaggtcaggagcgggggagggtagggtcctggggagggaagaggaggggcagcacctggggaccacggtggcagtgggggtggggggtgcagcctcctgatgggtccccatcccgcctctctgccatgccccgcatcaaaccccagtgacgactacgatgacacagacgatgacgaccctttcaaccctcaggtactggatgcctgggtctgagggaggaggggcggggggtcctgaactcctgggtctgagggaggaggagctgagggcctggccgcctgggtctgagggaggaggggctggggcccggactcctgggtctgagggaggaggggctggggtcccacagtacaaagccaattcccactccattccctcctctcccccgctaccccgaatctcctagcaggaatccaagcgctttgtgcagtggcagtcgtctatctgagcccctcctcccggctggactggagcctggctcccctcttcggtgagcttccaagggccaccccagctcctgcagccgggcctctgcccccctcccgccctccgagctgctccaggcatgggctgcgtgcctcctgctgggtggatcgcaccgggcaggccctccagcctgcatcactgccctgtctctccctctctccgcagttccttccctggctgccggaggagaccccactaacccagcctgcctgggctctgaccactaacactcttggccatggacagcctgcacaggaccgcctccctgctcttggccactgtgctcccatttctgtccttggccttgggagtagctgagggggcagactagggagtagggctggcaggggagggggcagacagcctcgcctcgcacccttcatccctggctgccggtcccatccttggagggactaagctgggggtgggggacatgagtccccctgctgcccctgccacatcccagtgggctctgaccccctgatctcaactcgtggcactaacttggaaaagggttgatttaaaataaaagggaagactattttacaagcagctgggtcctccttatttctcctctcccttgattcggcctcctggccagggctgggacatcctccctgctgtcctctctcccccggcctcccagctgccaggaatttctgcgcctgtccaggctcagcaaggggtccaaagacattgttctttaaaaaaaaaaaaaaaaaaatcaaaaaacaaaa

SEQ ID NO: 2834 - DNA, 326 bp, Homo sapiens
aagaccctgcctctttttttttttttttttttgtttttgagacggagtctcgctctgtcacccaggttggagtgcagtggcgcgatctcggctcactgcaagctccgcctcccaggttcatgccattctcctgcctcagcctcccaagtagctgggactacaggcgcccgccaacacgtccggctaattttttgtatttttagtagaaacggggtttcaccgtgttagccaagatggtctcgatctcctgacctcgtgatccgcccgtctcggcctcccaaagtgctgggaatacaggcgtgagccaccgcgcccggccaagaccc

SEQ ID NO: 2835 - DNA, 904 bp, Homo sapiens
aaaggatatagggagcgattaggaggctggagcagcatccaagaaagaagtggtggcaagatggactggtgggtaagagtgggaagagagagcagtgggctgatgtgcttctctacatttgcctcgtttgctttcttcctctctggtcctacctttctgtggacctttgcagccttgccgccacctgtctctgctgataattctcatggttctgtcactgggctgcttctcttgaagttgttgaacgcactcttgccgaatgacctcatctacttccacagctatgataaccatttatatgccagcaagtctcagatttataactgccaatccgatctcttctcttgagcttcagatgtgtggatatctcagtttatatatcccagatccccaaaactcagcaaaaatgagttatgttcccttccagacatgttccttctcccatattgcctatcttggtaaatggaacccccatcctactggtgttctggcatcattcttaatacctcctgcccctgcctcccacagtcattcccaaatcctgccaggtataccttgcagagagctcgcaaatctttccacttctctacttcccctactgccagtaccctcgtttgggctattgtcaactctcattcagaggattacaaaagtctcctaagttgccttcttacttggactcttgcttgcctctgatcctttctccagttgttacctgagtcatcttttcgcagatctgatattgcttaaaatccaccaaaaactcctcttttgcctacagaataaagcacagatttatttttttcttcttaaagcagatgtttaaacatggtttaacaaggcccttcacaacttaaccctagcctacctttctagccttctcttttgtaactctctacccaag

SEQ ID NO: 2836 - DNA, 904 bp, Homo sapiens; identical to SEQ ID NO: 2835

SEQ ID NO: 2837 - DNA, 7696 bp, Homo sapiens
ttgagtttttgttatggttttattctgtttagttttttaaagtaaaacttcacctcattatgaaagttttacagcatttaaatttttatgttcaacatgtttctcaaaatcatttcaatattttgatccccagtttttgtcatgatcagctcacatctgctccttatctaacctttttaattttgtccatgaccatcctacactgcaggcttctcaaccagatgagttgaccattgaggaacatgaggtgttagaagtgattgaagatggagatatggaagactgggtaaaggtatattcctttgctcatatcgccctttcttgtgacatttttaggagtttgttttggtctttgttgtgccctgtctaaattgtgtgtgtaaacttgttttgtcacatgtcttttacccaggctcgaaataaagttggccaagtgggttatgtgccagaaaagtacctacagtttcccacctcgaacagcctcctgagcatgctgcagtccctggccgctttggacagtcggtcacacacgtccagcaattccacggaagcagaactcgtttcaggcagcctcaacggagatgccagtggtaaagactgaaacaaggcactctttatttggtcacgtttgacctaaactgtattgccctggagtaagccttcagtaggataaaaagcacaactttcctcctgtcctataatatgcttttctttatatggtcacgtttgtcctgcacagtagaaccctaaagttaatcattcatcagtgagtaaaaaaattacaactttaatcctattctgtatgatgctcttttagttgtcatgtgagcataggggtggttgcaaaagcaaccggctgttaattatcttaccagatttgtttttctcttgctccctagtatgttttgtgaaagcactttatgattatgagggccagacagatgatgagttatcttttcctgagggagcaataatccgtatcttgaacaaagaaaaccaagatgatgatggcttctgggaaggggaattcaatgggcgtattggagttttcccatcggtgctagtggaagaactttcagcctcagaaaatggtgacactccatggatgagagagattcaggtacctgagaggggagacagttgaattaaaagatgtttaaagaaaattgctcccaaagggtctgtggatccacacaaaagtgggctgcagtctctgccttaccctcaccggtccttggttgccagtgtctgcacaactgcatttgggaaaccagagacttgtcagtcagtcccttgtggaatgtggccatcctcccacacctccatcttcccacattctctctcttccttgaattggttaaccaaaatgccaaattatatgtgacataccaaagatcgttttggtggagagaaagaaacaaaccgaagagggaaggcgttgctctgtggttaatttacgtagtaaaactcttagctggctctctctctccctcactgtcagagcctccttgcctagtccaggtcctgccagtctatttcagagaattaatgagcctgccagagcccctaatccccactcaagtgaccctagacttagttcatcacagggaaacagcctttaaaggaacctctaattcagtcagagtttagtttgtcccctcagggatctatcactgcaggccagacaggtagaggaagaaggaacgtgtttgccgatcttgtttgcgtggtgattgtgaccccttagcctaacatgcacaaaacctggggaagtcagaaattcagcaaagtattttatcttcaccccaaaaaatccaacttgttccttttgttgttgttgttcttcgctaagtttactgaattgactaatttggtacattttcaacagaacccctagagagtagcttcacttgataactgtttaagataaactaaattcagtaatgtgatgagatctgtaagaggaaaaagtgaagtgcaatgcaaaattggagcttgaggtggttatttaatgctcagttgcctctaatgaggttgacaagtttcaacaatcagcttagctttagagaaaaggcatgagtacagagcagtcagagaagcagccaggctctccttcctggaggggagcaccgggtaacctcgcttccctttgctgcagatctctccttcccccaagccacacgcctccctgcctccactgccgttgtacgaccagcctcccagcagcccctaccccagcccagataagaggagctccctgtactttccccggtctccttcagcaaacggtaagggttctcctgggcatgggtctaaatgcattttcacttcagaaacctacatattcgcctgaagggcaaaaaaaaactgcatttgctttttttttttttttttttttttttggagacagagtctctgtcacctgggctggacacccaggctggagttcagtggcatgatcacggctcatagcaaccaattcctgggctcaagtgatcctcctgcctcagcctccctagtagctaggaatacaggcatgcaccaccacacacagctaatttttgtattttttctggacaaagggtattattctgtcacccaggctggagtgcagtggtgggatcatagctcactgcagccttgaacttctggcctcaagtaatcctcccgcctcagtatcccaaagtgctgggattacaggctcaagccaccatgccagccttgcatcagcattattgctcaacaactcaagtaaaatgagcttctttggttttctcccttagaaaaaagccttcatgctgagtcaccaggattctcacaggcatcaaggcatactcctgagacctcatatggcaaactgcgacctgtaagtctctgatcttgcaggattatcgaatgcatagttcttccaaattgaaagtaaggaattaatgtttccccgtggcccctgtgttgttactgactatgccaaacaaggatgaactgggtttgggaaggtaaaaagagctattgaaaaggaaggccatagaaatcaactcatctcgggacatttaatctacactggaacttttttcactgagccacagtgagattgcaagatgatggctatgaaagtgatttagaatagaacaaactttatgagcattaaagcgggctaattgtgaaacacttttttcagtaagcatttaattttccaggcctctatttgcctctttgaggaataccaagatgaaataataagctaacttcatggccttaaagagcgtttattctccgggtgaatatattattgcaaagttacctctcctcacccttcactctactgccatctgcattccacccaccactgtactccaaggtcataacttgcacggtaatccagtcggatactttgcaattttattttccttgacccctattagcttttgataccattcctttaccactggcttcttttggcttcattcattcagcaaatatgtattgagtgccttcttaaggacttgagtctttatcccaaatgagacaggaagccattgtaaagtggtaagctggacagtgttgtggctggtgcatttttaaagcatcgctatggcagctaagaggcggatggatggagggtggcagaaaggatatagggagcgattaggaggctggagcagcatccaagaaagaagtggtggcaagatggactggtgggtaagagtgggaagagagagcagtgggctgatgtgcttctctacatttgcctcgtttgctttcttcctctctggtcctacctttctgtggacctttgcagccttgccgccacctgtctctgctgataattctcatggttctgtcactgggctgcttctcttgaagttgttgaacgcactcttgccgaatgacctcatctacttccacagctatgataaccatttatatgccagcaagtctcagatttataactgccaatccgatctcttctcttgagcttcagatgtgtggatatctcagtttatatatcccagatccccaaaactcagcaaaaatgagttatgttcccttccagacatgttccttctcccatattgcctatcttggtaaatggaacccccatcctactggtgttctggcatcattcttaatacctcctgcccctgcctcccacagtcattcccaaatcctgccaggtataccttgcagagagctcgcaaatctttccacttctctacttcccctactgccagtaccctcgtttgggctattgtcaactctcattcagaggattacaaaagtctcctaagttgccttcttacttggactcttgcttgcctctgatcctttctccagttgttacctgagtcatcttttcgcagatctgatattgcttaaaatccaccaaaaactcctcttttgcctacagaataaagcacagatttatttttttcttcttaaagcagatgtttaaacatggtttaacaaggcccttcacaacttaaccctagcctacctttctagccttctcttttgtaactctctacccaagacacactgaaatgtttcatttctctaagcattgctctcccttgcttccagccagacctttgctttggaggatgtgctaggatcttagtcataggacttgtgcccatgaggtttttagcctaggcaagaagctgatttgtgggcttgatatttcattgagaacaactgcttctcagtgtaggaaatagtgaagactaggttgaaagcacgtgctcacaacatttctgagacccctagggtgcccatgtccttggacagatgagtgattaggttttggggatgcttcagatactgagtcaggaactgactgacaaactacgtaattgtttcctgctcaggtccgggcagctccccctccacctacacagaatcaccgaaggccagcagagaagattgaagatgtggaaatcacactggtgtgatgatgggcttgcccatccattactgctacaatcaaggccaggcttggagtttggccagtcttgttttttaggcacctttgcatgatgatgactcttgaacagagcaaaaaacaaggaggattatgtgtgactgggtggcctggtagactcctcccacgttttgaatatttcgtgccttttttttttgttgtcattttctatgtcatttctcctaccatagcacaaatcctagcggaccctaggagcaaagaggggggcagccctcatgcctaacagtggtctgtttttatatgagactcaagaacaggcctcattccagggcacagtccctaaattactgatcatgtgcactcgtacagtatattactgtgaccacaaggatgtggcaaagattctcatctttcttcaagtggcttttgctcatctgattgagaattaatcagatcatgttggctacataaggaaacagaaggagggatttcaggagaggctggctcctccccaaggttagtccccagactgagaaagtgaaaccttattgggaaaaattggactgccctgaatttagcaccaattgcattaacgcacatctcttccacaactaacagacttaaaataacagtgtccttcgtattaatatctgtgccattcatttagaattagcagagctaatatggaggggctgaactagtagccacatcttgttcatcacatagactaatagaaaggaggctgtggctaaagcagaaatggaacttccggatctgaaattagccaatataatgttcttttgtatttgggtatttttcatcttaatttttacagcatatactcttcttaccagtatccttagaatccaaatgtctagataagttgaggacacatacctgcattgttgagcttctctactggggacgccccggcattattttattcccaagccagcagaccggcccagacagccaggctgtggctggtccagaccaactgctatggtggaaaatgcagcttccaggtcccactaccctgacatttccgtggaaggaagaacctggtggctcgtggaggaaaccagctttctatgagaaaggactgaaggattgcgcaccctgcacaagtacagattgaccaggaaaagacaagtgtcttctgtgtgtcacagggaaagccaggagtggccttctctgcaggccagcaagcctgcagcagcaggtgcccccacgtcaggtgctgactgtctgctgtccgctcctgtagaaggtagggagcacaatacctagggactaagggatgttcgccggttgtggtttgttttttttttttttccttggttaagaaatcaaatttgcagaatttaatctacaagttgtattatgctttgaaaactccatccctcctaagaatcttaaaaaacttgaaatgctcgccaaatgtccccatgggatttttgaccaaaagtaaggtgataactgaagaaatttttagttctttgatcacttcagtgacaatacccattaatgaatcttctccatgatttggggttttttttcgttgttgttttttacacttcttaacctgttgatctatttgaggtcttttgtgtttatcaaacttattcttaagtttaaaaaagaaattaaaagggtggtttttttaagattttaaagtttgctaacatattaaaaatcttcaaatgcttattaaatagagcagttcttgccacccagtcttgtattctgtctttagctagccaaattgtccttgaatttgggttttccacaacctcaaagggttatttgaaatcttttgttgtattttaaaatattttttggaagagctgctaattttattttaaaaaacaaagttgtgaaaacatgcctcctttttaaaaaataacccctccatccaggatatggaatccagcaccacagtgcacaggtcagggctcggagggagcctctgtgcagatgtgctttctttacagtggctgtaaaaagtttgtatttattatgtataaaatgttgaataataaaaaaaatggaattatgttttctaagttttaatatagaaaggtttgggtaaacagacctttccaaaaggcccatgcttcttataaaaacattcctgggccctcctttaaaccagctaacagacagagagaggagaaagtaaattaatccatctatgagacagacagtccctgaagcccccatgtgctaggtgtaatatcctgggtactagagatggcagtaaataggttacggtctttgcttttcccatgggaaaaaaaagaaatacgtgaggacagtactgtgggacatgtgctagaagggaggggcagatagcatagaggcagctgaggagggagctctgattctgctgctggaggggtgagaggaaggtcactgaagtccccttgccggatgtgaccactggcttccaggaagcgggcattctggatgcctctcccctttcctaaacctccaccctaaggagtaatgaattgtgtgaaaggagattttctcggtcccaggggtggatggagcattcttagtcaaaggctgagtccccctggcttccagccagccacactgaggaccaggacacagcctgtttggggaagggccccacaagctctcctctttcctggagctggggacatgcagtaagcatttttccagacattatcctgtgcataagactcttaagtgtacacactgcttgtttacataaaaatgtgttca

SEQ ID NO: 2838 - DNA, 321 bp, Homo sapiens
cacccaggctggagttcagtggcatgatcacggctcatagcaaccaattcctgggctcaagtgatcctcctgcctcagcctccctagtagctaggaatacaggcatgcaccaccacacacagctaatttttgtattttttctggacaaagggtattattctgtcacccaggctggagtgcagtggtgggatcatagctcactgcagccttgaacttctggcctcaagtaatcctcccgcctcagtatcccaaagtgctgggattacaggctcaagccaccatgccagccttgcatcagcattattgctcaacaactcaagt

SEQ ID NO: 2839 - DNA, 2339 bp, Homo sapiens
atagtgaagactaggttgaaagcacgtgctcacaacatttctgagacccctagggtgcccatgtccttggacagatgagtgattaggttttggggatgcttcagatactgagtcaggaactgactgacaaactacgtaattgtttcctgctcaggtccgggcagctccccctccacctacacagaatcaccgaaggccagcagagaagattgaagatgtggaaatcacactggtgtgatgatgggcttgcccatccattactgctacaatcaaggccaggcttggagtttggccagtcttgttttttaggcacctttgcatgatgatgactcttgaacagagcaaaaaacaaggaggattatgtgtgactgggtggcctggtagactcctcccacgttttgaatatttcgtgccttttttttttgttgtcattttctatgtcatttctcctaccatagcacaaatcctagcggaccctaggagcaaagaggggggcagccctcatgcctaacagtggtctgtttttatatgagactcaagaacaggcctcattccagggcacagtccctaaattactgatcatgtgcactcgtacagtatattactgtgaccacaaggatgtggcaaagattctcatctttcttcaagtggcttttgctcatctgattgagaattaatcagatcatgttggctacataaggaaacagaaggagggatttcaggagaggctggctcctccccaaggttagtccccagactgagaaagtgaaaccttatggggaaaaattggactgccctgaatttagcaccaattgcattaacgcacatctcttccacaactaacagacttaaaataacagtgtccttcgtattaatatctgtgccattcatttagaattagcagagctaatatggaggggctgaactagtagccacatcttgttcatcacatagactaatagaaaggaggctgtggctaaagcagaaatggaacttccggatctgaaattagccaatataatgttcttttgtatttgggtatttttcatcttaatttttacagcatatactcttcttaccagtatccttagaatccaaatgtctagataagttgaggacacatacctgcattgttgagcttctctactggggacgccccggcattattttattcccaagccagcagaccggcccagacagccaggctgtggctggtccagaccaactgctatggtggaaaatgcagcttccaggtcccactaccctgacatttccgtggaaggaagaacctggtggctcgtggaggaaaccagctttctatgagaaaggactgaaggattgcgcaccctgcacaagtacagattgaccaggaaaagacaagtgtcttctgtgtgtcacagggaaagccaggagtggccttctctgcaggccagcaagcctgcagcagcaggtgcccccacgtcaggtgctgactgtctgctgtccgctcctgtagaaggtagggagcacaatacctagggactaaagggatgttcgccggttgtggtttgttttttttttttttccttggttaagaaatcaaatttgcagaatttaatctacaagttgtattatgctttgaaaactccatccctcctaagaatcttaaaaaacttgaaatgctcgccaaatgtccccatgggatttttgaccaaaagtaaggtgataactgaagaaatttttagttctttgatcacttcagtgacaatacccattaatgaatcttctccatgatttggggttttttttcgttgttgttttttacacttcttaacctgttgatctatttgaggtcttttgtgtttatcaaacttattcttaagtttaaaaaagaaattaaaagggtggtttttttaagattttaaagtttgctaacatattaaaaatcttcaaatgcttattaaatagagcagttcttgccacccagtcttgtattctgtctttagctagccaaattgtccttgaatttgggttttccacaacctcaaagggttatttgaaatcttttgttgtattttaaaatattttttggaagagctgctaattttattttaaaaaacaaagttgtgaaaacatgcctcctttttaaaaaataacccctccatccaggatatggaatccagcaccacagtgcacaggtcagggctcggagggagcctctgtgcagatgtgctttctttacagtggctgtaaaaagtttgtatttattatgtataaaatgttgaataataaaaaaaatggaattatgttttctaagttttaatatagaaaggtttgggtaaacagacctttccaaaagg

SEQ ID NO: 2840 - DNA, 2981 bp, Homo sapiens
atagtgaagactaggttgaaagcacgtgctcacaacatttctgagacccctagggtgcccatgtccttggacagatgagtgattaggttttggggatgcttcagatactgagtcaggaactgactgacaaactacgtaattgtttcctgctcaggtccgggcagctccccctccacctacacagaatcaccgaaggccagcagagaagattgaagatgtggaaatcacactggtgtgatgatgggcttgcccatccattactgctacaatcaaggccaggcttggagtttggccagtcttgttttttaggcacctttgcatgatgatgactcttgaacagagcaaaaaacaaggaggattatgtgtgactgggtggcctggtagactcctcccacgttttgaatatttcgtgccttttttttttgttgtcattttctatgtcatttctcctaccatagcacaaatcctagcggaccctaggagcaaagaggggggcagccctcatgcctaacagtggtctgtttttatatgagactcaagaacaggcctcattccagggcacagtccctaaattactgatcatgtgcactcgtacagtatattactgtgaccacaaggatgtggcaaagattctcatctttcttcaagtggcttttgctcatctgattgagaattaatcagatcatgttggctacataaggaaacagaaggagggatttcaggagaggctggctcctccccaaggttagtccccagactgagaaagtgaaaccttattgggaaaaattggactgccctgaatttagcaccaattgcattaacgcacatctcttccacaactaacagacttaaaataacagtgtccttcgtattaatatctgtgccattcatttagaattagcagagctaatatggaggggctgaactagtagccacatcttgttcatcacatagactaatagaaaggaggctgtggctaaagcagaaatggaacttccggatctgaaattagccaatataatgttcttttgtatttgggtatttttcatcttaatttttacagcatatactcttcttaccagtatccttagaatccaaatgtctagataagttgaggacacatacctgcattgttgagcttctctactggggacgccccggcattattttattcccaagccagcagaccggcccagacagccaggctgtggctggtccagaccaactgctatggtggaaaatgcagcttccaggtcccactaccctgacatttccgtggaaggaagaacctggtggctcgtggaggaaaccagctttctatgagaaaggactgaaggattgcgcaccctgcacaagtacagattgaccaggaaaagacaagtgtcttctgtgtgtcacagggaaagccaggagtggccttctctgcaggccagcaagcctgcagcagcaggtgcccccacgtcaggtgctgactgtctgctgtccgctcctgtagaaggtagggagcacatacctagggactaagggatgttcgccggttgtgggttgttttttttttttttccttggttaagaaatcaaatttgcagaatttaatctacaagttgtattatgctttgaaaactccatccctcctaagaatcttaaaaaacttgaaatgctcgccaaatgtccccatgggatttttgaccaaaagtaaggtgataactgaagaaatttttagttctttgatcacttcagtgacaatacccattaatgaatcttctccatgatttggggttttttttcgttgttgttttttacacttcttaacctgttgatctatttgaggtcttttgtgtttatcaaacttattcttaagtttaaaaaagaaattaaaagggtggtttttttaagattttaaagtttgctaacatattaaaaatcttcaaatgcttattaaatagagcagttcttgccacccagtcttgtattctgtctttagctagccaaattgtccttgaatttgggttttccacaacctcaaagggttatttgaaatcttttgttgtattttaaaatattttttggaagagctgctaattttattttaaaaaacaaagttgtgaaaacatgcctcctttttaaaaaataacccctccatccaggatatggaatccagcaccacagtgcacaggtcagggctcggagggagcctctgtgcagatgtgctttctttacagtggctgtaaaaagtttgtatttattatgtataaaatgttgaataataaaaaaaatggaattatgttttctaagttttaatatagaaaggtttgggtaaacagacctttccaaaaggcccatgcttcttataaaaacattcctgggccctcctttaaaccagctaacagacagagagaggagaaagtaaattaatccatctatgagacagacagtccctgaagcccccatgtgctaggtgtaatatcctgggtactagagatggcagtaaataggttacggtctttgcttttcccatgggaaaaaaaagaaatacgtgaggacagtactgtgggacatgtgctagaagggaggggcagatagcatagaggcagctgaggagggagctctgattctgctgctggaggggtgagaggaaggtcactgaagtccccttgccggatgtgaccactggcttccaggaagcgggcattctggatgcctctcccctttcctaaacctccaccctaaggagtaatgaattgtgtgaaaggagattttctcggtcccaggggtggatggagcattcttagtcaaaggctgagtccccctggcttccagccagccacactgaggaccaggacacagcctgtttggggaagggccccacaagctctcctctttcctggagctggggacatgcagtaagcatttttccagacattatcctgtgcataagactcttaagtgtacacactgcttgtttacataaaaatgtgttca

SEQ ID NO: 2841 - DNA, 321 bp, Homo sapiens; identical to SEQ ID NO: 2838

SEQ ID NO: 2842 - DNA, 261 bp, Homo sapiens
ccagcctgaccaacatggagaaacccagtctctaccgaaaatacaaaattggctgggcatggtagctcatgcctgtaatcccagttactctggaggctgaggcaggagaatcgcttgaacctgcgaggcagaggttgcggtgagctgagattgtgccattacactccagtctggggaacaagagtgaaactctgtctcaaaaaaaaaaaaaaaaaatatgttccagtataaatgttgggtagattcctaagtgtggaattt

SEQ ID NO: 2843 - DNA, 408 bp, Homo sapiens
gagattgtgagattttaaaaactttatggttttaggtgatggttttaacccatcttgggacttggggaaagcttttaagactgttttctagagagccagaagccagcaggcccctgtctattacacatgacaggcaagactgttaggaagcaaagccacacggactttccagcccctctgtggagcctcagagcgtttacagatttggcagtctcaagggcaacatgtgggtggctgatgctggtggattgctgctgtcagggataataaaaccattatggttagcagcttgtacggtagcacgcaaatggatcagctcagtctccacacagttaagttggagcataagaaatccaaaccatgactgatctcaatcatttcctttcctacaatttttttcttttggcc

SEQ ID NO: 2844 - DNA, 1648 bp, Homo sapiens
ctgaagagttgagtttggccacccagttatatgcagggctagtggtcagcctctctggcctcctgcccctggctttccgaagctgtctggctcgggtgcatgcagggacattacagcctcccttcacggcccggttcctgcgcaacttggcactgctagtagggtgggaacagcagggtggcgagggccctgcagccctaggggcgcactttggggaatctgcctcagcccatctgtctgacctggctcctctcctgctacatcctgaggaggaagtagctgaagctgctgcctctctcctggccatttgtccctttccttctgaagccttatccccctcccagctcctgggactggtaagggctggggtgcaccgcttctttgcctctctgaggctgcatggacccccaggtgtggcctcagcctgtcagcttctcacccgcctgtctcagacatccccagctgggctcaaggctgtcctgcagctgctggttgaaggagccttacatcgaggcaacacagaactgtttggtgggcaagtagatggggacaatgagactatctcagttgttgcagattctttggcttctgcctccctgttggacactaaccggaggcacactgcaactgtgccaggtcctggagggatttggtcagttttccatgctggagtcatcggccgtggacttaaagccacccaagtttgtccagtcacgaaatcagcaggaagtgatctataacacccagagcctcctcagcctcctggttcactgctgcagtgccccagggggcactgaatgtggggaatgctggggggcacccatcttgagtccagaggcagccaaagcagtggcagtgaccttggtggagagtgtgtgtcccgatgcagctggtgcagagctggcctggccccccgaggaacacgcccgggccaccgtggagcgggatctccgcattggccggcgcttccgcgaacagcccctgctctttgagctgttaaagctggtagcagctgcacccccagccctgtgctactgttccgtgctgcttcgggggctgctggccgccctcttgggccattgggaagcctctcgccaccctgacacgacccactccccctggcacctggaggcatcctgcaccttagtggctgtcatggctgagggaagcctcctgcctccggccctgggtaatatgcatgaagtatttagccaactggcacctttcgaggtgcgtctgctgctgctcagtgtctggggttttctccgggagcatgggcccttgcctcagaagttcatcttccaatcagagcggggtcgcttcattcgggacttctccagggagggtggaggtgagggtggaccccatctggctgtgctgcacagtgtcctccaccgcaacatcgaccgcctaggtcttttctctggccgtttccaggcaccttcaccgtccactctccttcgacaggggacgtagccttttcttgctctggaagcccagggaggttgagcagtgagagagggaagggactaacgtgctccggaagggtggaggtttctcttctaagtccttggtctaaagagcgctgtcacttttttctctcccacttttttttttctaaataaaatttgccaacttgagaaaacca

SEQ ID NO: 2845 - DNA, 1514 bp, Homo sapiens
ttctcttatgagggaagtatttttattatccctatttaacataaaaggcaaagctcatacaggaaaggtaagttgcctaacatctcacaacactcttaagtctgtttcttttgcttccttgtagtgctcaggagctgtcccaggaaatcaaggcttttctgactggcgtagaccccattctgggccaccaactctcagcccgggaacatgctcgctgtggtcttctcctgctccgttctttgccacctgctcgggctgctgtgcttgaccacttgagaggtgtctttgatgagagtgtccgggcccacctggctgccctggatgaaacccctgtggctggtccacctcacctccgtccacctccaccctctcatgtccctgctggtggacctggtctagaggatgtggttcaggaagtgcagcaggtgctgtctgagtttatccgggccaacccaaaggcctgggcacctgtgattagtgcatggtccattgacctcatggggcaactgagcagcacgtactcaggccagcaccagcgtgttccccacgctactggcgctcttaatgaactgctacagctgtggatgggttgtagggccacgcgtacattaatggacatctatgtgcagtgcctctcggctctcattggtagctgcccagatgcgtgtgtggatgccttgctggatacctctgttcagcattctccacactttgactgggttgtggcacatattggctcctcttttcctggcaccatcatttcccgggttctctcctgtggccttaaggacttttgtgtccatggtggggctggaggtggagctggcagtagtggtggaagctcttctcagaccccctctacagaccccttccctggatctcctgccattcctgcggagaaacgggtgcccaagattgcctcagttgtaggcatcctaggtcacctggcctcccgccacggagatagcatccgacgggagctcctgcgaatgttccatgatagcctggcagggggatctggaggccgcagtggggacccctcccttcaggccacggttccgttcctactgcagctggcagtcatgtcaccagctttgctgggcactgtctctggagagcttgtggattgcctcaagcccccagctgtgctgagccagctgcagcaacaccttcaaggattcccccgagaggagctggacaacatgttgaacctggctgtgcacctggtgagccaggcctctggggcaggtgcctaccgcttgctgcagttcctggtggacacagctatgcctgcttcggtcattaccacccagggcctggctgtgccagacaccgtgcgtgaggcttgtgaccggctaatccagctgctgctgctgcacctgcaaaaactggttcatcaccggggagggtctcctggggaaggggtgctaggcccgcccccacctccccgcttggtgccctttttagatgcgctcaaaaaccatgttggagagctgtgtggagagacgttacga

SEQ ID NO: 2846 - DNA, 95 bp, Homo sapiens
ggaggcggagcttgcagtgagctgagattgcgccactgcactccagcctgggcagcagagcgagactctgtctcaaaaaaaaaataaataaataa

SEQ ID NO: 2847 - DNA, 2177 bp, Homo sapiens
caaaagctgacgacttcggtctgcgccggaagtgcatgagctgccgatgtggtgcttagtgattgcggtttcggtcgctctcccgtgtttcccgggctgggtatttgcctcgcaccatggcggtaaggaggatggatagggcggggtccgcaccagcaaagctctccaggggctgtgagagtgaaaactgagaaagaacattaagggatatggggtgggccagagcggggcgccatccctggccagaccgtgctagagctgggctggggggatggcggcgcaggaccataccaggactagtgccagagcggggtgggcatcagtaccagggcaggccagagatctaagtgacctgaggtgggggttaacccagatcgggactacgccagcggaggcctgagagaggcaccattcaactccgctcaggagtacccttggaagagtcgttagcctaaagccagactaccacgggatccagaggcggtattagcttaggattgaattgttccagggcgagcaagaggcgattgatcctagctgcgggtgctggagagatggcgtcagccctaggcagaatggactggaggatgggtggacatcccagggattttgctaggtttctgcactacggggacctggctgagttgcggatggagctctatagctcaccaggctggtggggagaatgaggaggaccgtggcctcctgacggcatctcatcattcctctgcagcccaagggcaaagtgggcacgagagggaagaagcagatatttgaagagaacagagagactctgaagttctacctgcggatcatactgggggccaatgtaagtgcctacctccttgcttctatgcccacttatagtcagttccctagtcctcagccctgcttggtgacgaggagtggtacccgaaaaagctctagaagagagctccagtcaaaaagaaatgagagatctgggcacagagaaagtgctaactagtaaaacacaaagaaaatgaaggcgtgagtcgtagctgaatttgagagctcttcctacctccaagtacacaaaggcttctttcctgggctgagttgggtgtcagaggagagtgggtatttgggattcagggagcagggccctttcttcaaccctgtaagaacaaccttgctcctcccacagcctggcctaattcttggtcagagttgagggagacccatggtttggaggtaacttctgaccccaacctgatcctgtgattgcttgcaggccatttactgccttgtgacgttggtcttcttttactcatctgcctcattttgggcctgggtaagtatctccatcctgggaggtggatgagtgcgtagggtcagtggctggcctttgataccctcattcttgctctgcagttggccctgggctttagtctggcagtgtatggggccagctaccactctatgagctcgatggcacgagcagcgttctctgaggatggggccctgatggatggtggcatggacctcaacatggagcagggcatggcagagtgagtgtcccccaccgccagcccaggtgagcggccccagggctggggcccagatagcccaagaagcacagctacttgtaacttgaaaagggtggaagggagttgcaacttgaaaagggtggaagggcccatatgctgtctttccagctttatttctatccacaggcaccttaaggatgtgatcctactgacagccatcgtgcaggtgctcagctgcttctctctctatgtctggtccttctggcttctggtatgtgggctgggggcgctcccaagaaggggcatctaaccctccccatcttttattccctgcatcttgcttcaagttaccgtttctcttgtaggctccaggccgggccctttacctcctgtgggtgaatgtgctgggcccctggttcactgcagacagtggcaccccagcaccagagcacaatgagaaacggcagcgccgacaggagcggcggcagatgaagcggttatagccattgacattgtggccacaggccactggccctgggtggctctgtcagggtgcacagcccctcatgcctggagcaatgagggtctagtccaggggccaaaagcagtctgaggtattgggtatacttatactctatagggtcgttgaataaatggcttagaatgtgg

SEQ ID NO: 2848 - DNA, 2177 bp, Homo sapiens; identical to SEQ ID NO: 2847

SEQ ID NO: 2849 - DNA, 8925 bp, Homo sapiens
gttggattagctaagaaaattttattttgctccgtgcgttcaaggagctcacacacatgcacatgcatatgcatgcacacacacacatacacacacactcacatgcatacacacacggctaatactgctcaaggcatggctcctgggcacagagttctggggccagaattctgctctgggccctcctcactctgtcatctcctgcactgcagtccagggtccagatagatttccgggatacagcaccttcacacctccaggccaggacccttgcttagtcccagtgcctgcaccaggtcatctccgagcccactcttcaacgtccttctcactgcagggacagagcagggttggagggggttgatggggttcaggtgggcagtgggattgtggggggttacttacaagacttgcggttgccgcgggaacgcttgcgttccctagcagctaaggcacgaggactgctcttggtcactgactgcaccagaaggtccatgatctcatctgatgtatcactgggtaaactggagcctgggggttcttctggggatgcagtggagggccccactgtgggcatgattggggagctgctctggaccatgcctgaggaaggccagatagcaaagtcaggccaaggtggcactggagcccattccccacagctgctatgggcctcacctctgctgcggcgattgtgtgtggtgtcctcaggcctgctggtcagcagactcttcatactagcatgactgtcagcatctccccggcctggcccgctgctcactgctactgggacagaggggttgctgggggcttccccagccacacctgagaacttctctgtctggagaaagaagaagggtgagctgggaggagcgaaggaaaccaaggaggtggcagtcaagactaagacctggaagggcacccacctcggtgatcatgcgtccccgggtcttgttgcgctcacggtatgtggcctgcttctgctgctgctgtagcactcgttcccggcaagtccgatactcaagcgcaaattcccgcagcgtgtggcagaactgcatgatgcgcacttcacgggccgcctgcggggtgtagcccaggtagagcaggaaggcatggaacctaggcaggtcagagtagggagggacagtaagtcctgcttattgtctgagggagggtggtggccgtcctgcctctcttgggtccatgcccctacctattgcagacacggcggtgcactatccttagcatggcaacacggcgggcacactggtccaggaagtgggtgaggcgggcacgcagggctggggccagctcatgcttggccaagctccgcaggctctcctcggctgcccggctccggcgctccagctgccccaggttctcagtcagctgttcaaagtccacctgagaaagcaagggggtgcacatactgtccccccacaccctgtagacaagacatggcccgaggctgcttctgggccagagtggccagcttgggccctaaggacacagacatccaaatctcatagactagtgcaagagacacaagtccatctgatgtgaatggggagcagaaggtttactgggggaagtggcagttaaacagacccaaagactgagtaggtgtggccaggccaatagaggaaagagcatttctggcagagggcatagctcacacccaggtggctggagcaagccctggcacagcagcccaaatggggagaagggggaggagccaggcccaggaagcagcgctcctcatgccttgtccggccttggttgattctggcaggtgctaaccttggcacagcgggtcagggcagggatttctgaatagaggtcagaggactcaggccgggtctggagcactagggagcagagatggtgtagcagtgactgtcgacgcaccgtgtccttcacctctgacaccttctccaggtagctcagctcaaagccgctgctctgaaaggaccctttctgagcctgggcctggttggctccagaaccctgactccccctagtccccatgtactctcactcacctgggagccattgaggaagttgcccaccgctaggagggtagccaggatgcagcggaaggtggcattctgtaccagctgttccatacccactttcaggtcaaacagtggctcagcaatttcctggtatgggagaccagggactctcagactacatggtcatgatgcttacctgtccctactgactgtcccactccaagacccaggtacccgctccatgctgtcatagtccagcttgaaggcccagagttgtagacgagcagcgaggccgccaatggaggcaagagtcatcaggaagttctcggctgggcccaggggtatgtcagggttggccagctgggcttcctcaatcttctgccgctcttcctccgtgggcatcatggtcagtagcttctgaggatgtagccagagcctgacatggccccctcaatgcaggcctgaggcctgaggcattggtcttgacccctcagtcatctaggggaggccccagtgtctggggactgccctgcagaaatgccaagcccatgcccaccaccagagggacaggaaatgcccacctaccaaaggagaaggccagacctccccccaacacccatagctgggtgacctcacctcaatgccatccttgctgacagcaaactcatcaaagttgagcagagcagccttaatgacatgcacaggtggcagtgtggttaggccgatgttgatggcgttgctgcgcttggggtccagcactgtggtcattgtccggcggccctctccagctttctgcatggttgggggaagggcagtgtaagactgaggaagggggcctgacgcggtggctcacgcctgtaatcccagcactttgggaggccaaggcgggtggaccacgaggtcaggagatcgagaccatcctggctaacatggtgaaaccccatctctactaaaaatacaaaaaaaattagctgggcgtggtggcgggcacctgtagtcccagctactcgggaggctgaggcaggagaatggcgtgaacccgggaggcggagcttgcagtgagctgagatcacaccattgcactacatcctgggtgactgagcaagactctgtctcaaaaaaaaaaaaaaaaaaaaaaagactgaggaagggactagctgggacagcaacctcagagggcactccaaggccctcctctagattgccaaatgatcccacaactgacaaactggcaacctggaatgtgtaagtcatggggatgagcttagattcttttgagacagggcctggctctaccatctaggctggagtgcagtggtgccatcatcgcccactgcagcttatcttctgggattttcctgcctcagcctcccaagtagctgggattacaggcgtgtaccaccatacccaactatttttttttttaacatttttttttccgcctcccaggttcaagcaattcttttgcctcagcctcccaagtagctggtattgcaggcatgagccaccacgcccagctcattttcatatttttagtagagacggggtttcaccatgttggccaggctggtctcaaactcctggcctcaagtaatctgcctgccttggcctcccaaagtgctgggattacaggggtgagccaccatgcccggctaattttttttttaacatttatttatttttatttatttagttatttttgagacgaagtcttgctcttgtcccccaggctggagtgcaatggtgcgatctcgactcactgcaacctctacctcccgggttcaagtgattctcctgcctcagcctcccgagtagctgggattacaggtgcccgccaccacgcttggctaattttgtgtttttagtagagacggggttttgctaatttgaccaggctggtctcgaactcctgacctcaaatgatccacctgcctcggcctcccaaggtcctgggattacaggcatgagccactacacccagaccaacttttagtagagataatgtctcactatgttgcacaggctggtctcaaactcttggattacaggtgtgagccaccatgcccggccacatttagattctagttggggcactgctgatcccttgttaggagaccttggacaatttcctactcctttctttgccttggtttccccatgtgggaagtgagtgactagctccaacaggtcagatccttaagctctgattccctcctgcctcccttggggctaccttgcagatgagtggatttaccttggagggcagcacctctttggcacgagactcaaagaggtgttccagtcgggccgtgtccactgagacagggtccagtgaagcccagagggtggcgcagggcccaaagcggcttgcagagactccatggcccccagccagcttcagctcacgccagaaaagttttactgtcttcctcttagtggggagggctgagctgtcaggcactgaatggggaagaggggcagccagaggtagaggtggaggtggtgggaaggggcctttgatgggtgggggaggtggaagtgggggaggggggggtactcccgagagcaggggcagtgggggtgagggagctgggatgtctttcccagcctccacagactctacattcagcatgtcctggtcttcatcctcccctagatctgaaaagtccaggtccccaatagagagcctgggtgcacgggtagggagctcccagatgggctcagccttggggcttgctggtatcagtggctccttgggctctggtgcaaggcttcgctgggcccggagcaggacacagggggcagggctctggggtgttctggctgcaggggctgtctctggggagtcccagagttgccgggcatctaaagaaagggaaggagctgtcagtgccatgccccctgtggggcaacaaagcaacaggcaggctctgcctgctcacccacctactcacctgggtgtccacccgcctcattgggcatggccccggcaagtgtctctgcccggccctgggccagcgcaacctgcttctctgtttctgctgccgccacattctccaggaaccgggctctgagggaaggtgcttgtcactgacagcgtctgacacaccccagcccaggtgtacatgccttgctgagcccctggacaccacccccaattgcaggcacgcacagacacacagggaacagtccatgcgctgagcagaccagaaccacaccccccccaaggccagcccctcttcagtcctccacatctggggaggattactaccaacccagcattcccaggtgaaaacacagggagaggatctacttaacatctaacttgcaacctcgttcatgttcactgtcctggtttttttttggttggttttttttttagagacagggtctcactctgtcagtcacccaggctggagtacagtggtgtgatcatagctcactgcagcctcactctcctgggcttgaccctcagcctcccaagtagctgggactacagacatgtgccaccacgtccagctgattttttaatttttttgaggagacagggtctcactgtgttgttcaggctggccttgaattcctggcctcaagcagtcctcccacctcagcctcctgaagtgctgagattacaggtgtgaatgatgcacccagccaaattttaaaaaatttctttgtagagatgaggtcttactgtgttgcccaggctggtgtcttgagtctagacaaggactcttagagcaggggaaggggatagctgtcccaatgggcatatcaggctgtccctcccttggcatgtctggtagcttctgggagcctatgcccaggaaagggcctggtaaacaggccaggtgcggtggctcacgcttgtaatcccagcactttgggaggcagaggtgggtggattacttgaagtcaggagttcgagaccagcctggccaacatggtgaaaccctgtctctactaaaaatacaaaaattacccaggtatcctggtgcaggcctataatcccagctacttgggaggctgaggcaggagaattgcttgaacctgggaggcagaggttgcagtgtgctgagatcacaccactgcactccagccttggagaccgagcaagactctgtctcaaaaaaaaaaaaaacaaaaaaaaaacggatgtggtaaacagtggaccctcagtttatgctgaaataatgggtgcaatccagtgtttcttttctggcccctccagcctctgtcagctctcagtccctgcctttccctcagccttaggttacccctccacccccacaccacacaccacacagcaccctaggtcccctccctgctcgcttctgagctgaagacttggcagaatgagccccaggttgggtgtccacatccccatctctggctgctaaggtgttgctattgaagcacagggaccactgtgaccccagtgaattggttcccagtgcttagcctttgggttaccgaggaggcatatgtctgggagaggataggcctgagtcccccagctttggttgcatcaggcacgtgaaacccctgctgggggaagcaatgctgaagccctgagcacatggcaggcctggcaggccggcctctgtacttactccagcctggcctgcccaggaggggactgggggacgggtgggctctcaggggccctgggtaggggggatgagaggaagagatggtaactgtggtgtcagctccatggttgctcatacccacacagagctaggcagtgatattggggttccttcccagccgcagtgggaagtgggggaaggtatgacacgaggaaactggaagtggaggggagagactgacgtggagcaggacagggtgctggaagagacagaggcagcagaacaagggagtgacagatagtgggcgggagacatgacaagaggcaaagacaggcagaacgtcggaggagacaaaggaaaccacaggaggaggagatccagtcagagccgaaccccacccgctggcagtcacttaccaaacggaagcagtttggtgaagtctggaaagagagagagagaaagcacgcgtttgggcagaggaggctgagtgcccatggaggggcgcaaagcggagggacaatgggagagaggactccagggtggcctctgtctccctacttacttgtagatgctcctctcgctggaggtgtcagctgagggtgccacagagatggtaggaaaaaggttcactgaagcttggagaccggagggagggcccacagggctggaggcggggcctgtcagcagggcggggccggtggaagaggtggggcctaccggtgaggcggggcctgtggggctgaaagcaggggctgtcagtggggcggggcctgagaagctggaggcggggcctgtcagtggggtggggcctgcggggcgggaggtggggcatgtcggtagggcaggcccagtggaggaggtgggggctgtctgtggggcggggcctgagggggttggggtcagggcctgtcagctcactgggccatgcctagtagatccaccctttcccatctacagatgctcgtacttacccaggttccggggcacgcgcggggcagcccccgccttccagagaacggcggctcctcttgccctcctcagaagaaggctttcgtcgttcccgccgcccaccagcgcctggggcttcttcgatgtctccatcctccaatttcagggcgttctagcagaggcggaccaggatgtaagaaagtggttaacgtgtatgcaggtggggtggggcgctggggactgcgcttctctcttccctctttccaatccgcctcagagcgtaaggcccggcccacctcgtagagcacaagctgcgtgcgcaggtcgacgtcagtgcccgcagtgcccaggtggcgctggaccagcgcttccatgccctgctgctccagtgcatccgtcacatcgtagaaggagtcctggtccgggagcgccgccagcgtctggagggcggggataagaaggcaaggctgaggttggtggggaggtcaggagcctgagcatcccagagctggcacccagtccttggccacaccttgttgatgagggtgaccgtgtacaccaacaactcagggtcagcgccattcttctcctccaggatggacaccagattggcccagggaggagcacctgccacacagaaagtggagcagtcatgggggaacaggtaggagagagggctctgagcggtggggggagaaagggacagtctctgaccggtggtgctggccacagagttcactgcacggatgaacagcggtgcgttgttttcggagtattctacaaacaccaacagcagcttcagggctgtcttcaccaccaagcgggactgaggagagaggtcagtacatatgagtggggcttaggccagacctgtgccagctgttgctggggaaggggaagggctgctggggctggacccagagagaatctaggcagaatgaccctggccccaggcccaggcactgaagtgccttataggcttacagaggcctcagactcactcccttccagctcactttgcagaacaggaaactgaggcccagagagaagcaacaggcaaagggtataaggctgagtggagagccacttaccaggctggcacacaatgtgtacagccactgaatagtgtcactgtgggccaccacccccagcattccatccacaaagagcatcagctggccgagcgctggggaaacagggatgggcagagtcagcgagggtcgctggagcagaggtcatgggagaggggcggggctgacctctaaggatgtagctctggtagttgtggtcggcagcagcacccacacggatcaggcagctcagcccctctgaatgcacaaattcaggcaccaggtctttgtcctcctaga

SEQ ID NO: 2850 - DNA, 8924 bp, Homo sapiens
gttggattagctaagaaaattttattttgctccgtgcgttcaaggagctcacacacatgcacatgcatatgcatgcacacacacacatacacacacactcacatgcatacacacacggctaatactgctcaaggcatggctcctgggcacagagttctggggccagaattctgctctgggccctcctcactctgtcatctcctgcactgcagtccagggtccagatagatttccgggatacagcaccttcacacctccaggccaggacccttgcttagtcccagtgcctgcaccaggtcatctccgagcccactcttcaacgtccttctcactgcagggacagagcagggttggagggggttgatggggttcaggtgggcagtgggattgtggggggttacttacaagacttgcggttgccgcgggaacgcttgcgttccctagcagctaaggcacgaggactgctcttggtcactgactgcaccagaaggtccatgatctcatctgatgtatcactgggtaaactggagcctgggggttcttctggggatgcagtggagggccccactgtgggcatgattggggagctgctctggaccatgcctgaggaaggccagatagcaaagtcaggccaaggtggcactggagcccattccccacagctgctatgggcctcacctctgctgcggcgattgtgtgtggtgtcctcaggcctgctggtcagcagactcttcatactagcatgactgtcagcatctccccggcctggcccgctgctcactgctactgggacagaggggttgctgggggcttccccagccacacctgagaacttctctgtctggagaaagaagaagggtgagctgggaggagcgaaggaaaccaaggaggtggcagtcaagactaagacctggaagggcacccacctcggtgatcatgcgtccccgggtcttgttgcgctcacggtatgtggcctgcttctgctgctgctgtagcactcgttcccggcaagtccgatactcaagcgcaaattcccgcagcgtgtggcagaactgcatgatgcgcacttcacgggccgcctgcggggtgtagcccaggtagagcaggaaggcatggaacctaggcaggtcagagtagggagggacagtaagtcctgcttattgtctgagggagggtggtggccgtcctgcctctcttgggtccatgcccctacctattgcagacacggcggtgcactatccttagcatggcaacacggcgggcacactggtccaggaagtgggtgaggcgggcacgcagggctggggccagctcatgcttggccaagctccgcaggctctcctcggctgcccggctccggcgctccagctgccccaggttctcagtcagctgttcaaagtccacctgagaaagcaagggggtgcacatactgtccccccacaccctgtagacaagacatggcccgaggctgcttctgggccagagtggccagcttgggccctaaggacacagacatccaaatctcatagactagtgcaagagacacaagtccatctgatgtgaatggggagcagaaggtttactgggggaagtggcagttaaacagacccaaagactgagtaggtgtggccaggccaatagaggaaagagcatttctggcagagggcatagctcacacccaggtggctggagcaagccctggcacagcagcccaaatggggagaagggggaggagccaggcccaggaagcagcgctcctcatgccttgtccggccttggttgattctggcaggtgctaaccttggcacagcgggtcagggcagggatttctgaatagaggtcagaggactcaggccgggtctggagcactagggagcagagatggtgtagcagtgactgtcgacgcaccgtgtccttcacctctgacaccttctccaggtagctcagctcaaagccgctgctctgaaaggaccctttctgagcctgggcctggttggctccagaaccctgactccccctagtccccatgtactctcactcacctgggagccattgaggaagttgcccaccgctaggagggtagccaggatgcagcggaaggtggcattctgtaccagctgttccatacccactttcaggtcaaacagtggctcagcaatttcctggtatgggagaccagggactctcagactacatggtcatgatgcttacctgtccctactgactgtcccactccaagacccaggtacccgctccatgctgtcatagtccagcttgaaggcccagagttgtagacgagcagcgaggccgccaatggaggcaagagtcatcaggaagttctcggctgggcccaggggtatgtcagggttggccagctgggcttcctcaatcttctgccgctcttcctccgtgggcatcatggtcagtagcttctgaggatgtagccagagcctgacatggccccctcaatgcaggcctgaggcctgaggcattggtcttgacccctcagtcatctaggggaggccccagtgtctggggactgccctgcagaaatgccaagcccatgcccaccaccagagggacaggaaatgcccacctaccaaaggagaaggccagacctccccccaacacccatagctgggtgacctcacctcaatgccatccttgctgacagcaaactcatcaaagttgagcagagcagccttaatgacatgcacaggtggcagtgtggttaggccgatgttgatggcgttgctgcgcttggggtccagcactgtggtcattgtccggcggccctctccagctttctgcatggttgggggaagggcagtgtaagactgaggaagggggcctgacgcggtggctcacgcctgtaatcccagcactttgggaggccaaggcgggtggaccacgaggtcaggagatcgagaccatcctggctaacatggtgaaaccccatctctactaaaaatacaaaaaaaattagctgggcgtggtggcgggcacctgtagtcccagctactcgggaggctgaggcaggagaatggcgtgaacccgggaggcggagcttgcagtgagctgagatcacaccattgcactacatcctgggtgactgagcaagactctgtctcaaaaaaaaaaaaaaaaaaaaaaagactgaggaagggactagctgggacagcaacctcagagggcactccaaggccctcctctagattgccaaatgatcccacaactgacaaactggcaacctggaatgtgtaagtcatggggatgagcttagattcttttgagacagggcctggctctaccatctaggctggagtgcagtggtgccatcatcgcccactgcagcttatcttctgggattttcctgcctcagcctcccaagtagctgggattacaggcgtgtaccaccatacccaactatttttttttttaacatttttttttccgcctcccaggttcaagcaattcttttgcctcagcctcccaagtagctggtattgcaggcatgagccaccacgcccagctcattttcatatttttagtagagacggggtttcaccatgttggccaggctggtctcaaactcctggcctcaagtaatctgcctgccttggcctcccaaagtgctgggattacaggggtgagccaccatgcccggctaattttttttttaacatttatttatttttatttatttagttatttttgagacgaagtcttgctcttgtcccccaggctggagtgcaatggtgcgatctcgactcactgcaacctctacctcccgggttcaagtgattctcctgcctcagcctcccgagtagctgggattacaggtgcccgccaccacgcttggctaattttgtgtttttagtagagacggggttttgctaatttgaccaggctggtctcgaactcctgacctcaaatgatccacctgcctcggcctcccaaggtcctgggattacaggcatgagccactacacccagaccaacttttagtagagataatgtctcactatgttgcacaggctggtctcaaactcttggattacaggtgtgagccaccatgcccggccacatttagattctagttggggcactgctgatcccttgttaggagaccttggacaatttcctactcctttctttgccttggtttccccatgtgggaagtgagtgactagctccaacaggtcagatccttaagctctgattccctcctgcctcccttggggctaccttgcagatgagtggatttaccttggagggcagcacctctttggcacgagactcaaagaggtgttccagtcgggccgtgtccactgagacagggtccagtgaagcccagagggtggcgcagggcccaaagcggcttgcagagactccatggcccccagccagcttcagctcacgccagaaaagttttactgtcttcctcttagtggggagggctgagctgtcaggcactgaatggggaagaggggcagccagaggtagaggtggaggtggtgggaaggggcctttgatgggtgggggaggtggaagtgggggaggggggtggtactcccgagagcaggggcagtgggggtgagggagctgggatgtctttcccagcctccacagactctacattcagcatgtcctggtcttcatcctcccctagatctgaaaagtccaggtccccaatagagagcctgggtgcacgggtagggagctcccagatgggctcagccttggggcttgctggtatcagtggctccttgggctctggtgcaaggcttcgctgggcccggagcaggacacagggggcagggctctggggtgttctggctgcaggggctgtctctggggagtcccagagttgccgggcatctaaagaaagggaaggagctgtcagtgccatgccccctgtggggcaacaaagcaacaggcaggctctgcctgctcacccacctactcacctgggtgtccacccgcctcattgggcatggccccggcaagtgtctctgcccggccctgggccagcgcaacctgcttctctgtttctgctgccgccacattctccaggaaccgggctctgagggaaggtgcttgtcactgacagcgtctgacacaccccagcccaggtgtacatgccttgctgagcccctggacaccacccccaattgcaggcacgcacagacacacagggaacagtccatgcgctgagcagaccagaaccacaccccccccaaggccagcccctcttcagtcctccacatctggggaggattactaccaacccagcattcccaggtgaaaacacagggagaggatctacttaacatctaacttgcaacctcgttcatgttcactgtcctggtttttttttggttggttttttttttagagacagggtctcactctgtcagtcacccaggctggagtacagtggtgtgatcatagctcactgcagcctcactctcctgggcttgaccctcagcctcccaagtagctgggactacagacatgtgccaccacgtccagctgattttttaatttttttgaggagacagggtctcactgtgttgttcaggctggccttgaattcctggcctcaagcagtcctcccacctcagcctcctgaagtgctgagattacaggtgtgaatgatgcacccagccaaattttaaaaaatttctttgtagagatgaggtcttactgtgttgcccaggctggtgtcttgagtctagacaaggactcttagagcaggggaaggggatagctgtcccaatgggcatatcaggctgtccctcccttggcatgtctggtagcttctgggagcctatgcccaggaaagggcctggtaaacaggccaggtgcggtggctcacgcttgtaatcccagcactttgggaggcagaggtgggtggattacttgaagtcaggagttcgagaccagcctggccaacatggtgaaaccctgtctctactaaaaatacaaaaattacccaggtatcctggtgcaggcctataatcccagctacttgggaggctgaggcaggagaattgcttgaacctgggaggcagaggttgcagtgtgctgagatcacaccactgcactccagccttggagaccgagcaagactctgtctcaaaaaaaaaaaaaacaaaaaaaaaacggatgtggtaaacagtggaccctcagtttatgctgaaataatgggtgcaatccagtgtttcttttctggcccctccagcctctgtcagctctcagtccctgcctttccctcagccttaggttacccctccacccccacaccacacaccacacagcaccctaggtcccctccctgctcgcttctgagctgaagacttggcagaatgagccccaggttgggtgtccacatccccatctctggctgctaaggtgttgctattgaagcacagggaccactgtgaccccagtgaattggttcccagtgcttagcctttgggttaccgaggaggcatatgtctgggagaggataggcctgagtcccccagctttggttgcatcaggcacgtgaaacccctgctgggggaagcaatgctgaagccctgagcacatggcaggcctggcaggccggcctctgtacttactccagcctggcctgcccaggaggggactgggggacgggtgggctctcaggggccctgggtaggggggatgagaggaagagatggtaactgtggtgtcagctccatggttgctcatacccacacagagctaggcagtgatattggggttccttcccagccgcagtgggaagtgggggaaggtatgacacgaggaaactggaagtggaggggagagactgacgtggagcaggacagggtgctggaagagacagaggcagcagaacaagggagtgacagatagtgggcgggagacatgacaagaggcaaagacaggcagaacgtcggaggagacaaggaaaccacaggaggaggagatccagtcagagccgaaccccacccgctggcagtcacttaccaacggaagcagtttggtgaagtctggaaagagagagagagaaagcacgcgtttgggcagaggaggctgagtgcccatggaggggcgcaaagcggagggacaatgggagagaggactccagggtggcctctgtctccctacttacttgtagatgctcctctcgctggaggtgtcagctgagggtgccacagagatggtaggaaaaaggttcactgaagcttggagaccggagggagggcccacagggctggaggcggggcctgtcagcagggcggggccggtggaagaggtggggcctaccggtgaggcggggcctgtggggctgaaagcaggggctgtcagtggggcggggcctgagaagctggaggcgggcctgtcagtggggtggggcctgcagggcggaaggtggggcatgtctgcagggcacgcccagtggaggaggtgggtggctgtctgttggggcgggcctgagggggttggggtcagggcctgtcagctcactgggccatgcctagtagatccaccctttcccatctacagatgctcgtacttacccaggttccggggcacgcgcggggcagcccccgccttccagagaacggcggctcctcttgccctcctcagaagaaggctttcgtcgttcccgccgcccaccagcgcctggggcttcttcgatgtctccatcctccaatttcagggcgttctagcagaggcggaccaggatgtaagaaagtggttaacgtgtatgcaggtggggtggggcgctggggactgcgcttctctcttccctctttccaatccgcctcagagcgtaaggcccggcccacctcgtagagcacaagctgcgtgcgcaggtcgacgtcagtgcccgcagtgcccaggtggcgctggaccagcgcttccatgccctgctgctccagtgcatccgtcacatcgtagaaggagtcctggtccgggagcgccgccagcgtctggagggcggggataagaaggcaaggctgaggttggtggggaggtcaggagcctgagcatcccagagctggcacccagtccttggccacaccttgttgatgagggtgaccgtgtacaccaacaactcagggtcagcgccattcttctcctccaggatggacaccagattggcccagggaggagcacctgccacacagaaagtggagcagtcatgggggaacaggtaggagagagggctctgagcggtggggggagaaagggacagtctctgaccggtggtgctggccacagagttcactgcacggatgaacagcggtgcgttgttttcggagtattctacaaacaccaacagcagcttcagggctgtcttcaccaccaagcgggactgaggagagaggtcagtacatatgagtggggcttaggccagacctgtgccagctgttgctggggaaggggaagggctgctggggctggacccagagagaatctaggcagaatgaccctggccccaggcccaggcactgaagtgccttataggcttacagaggcctcagactcactcccttccagctcactttgcagaacaggaaactgaggcccagagagaagcaacaggcaaagggtataaggctgagtggagagccacttaccaggctggcacacaatgtgtacagccactgaatagtgtcactgtgggccaccacccccagcattccatccacaaagagcatcagctggccgagcgctggggaaacagggatgggcagagtcagcgagggtcgctggagcagaggtcatgggagaggggcggggctgacctctaaggatgtagctctggtagttgtggtcggcagcagcacccacacggatcaggcagctcagcccctctgaatgcacaaattcaggcaccaggtctttgtcctcctaga

SEQ ID NO: 2851 - DNA, 16553 bp, Homo sapiens
gagctccgggggccgctgcagccgcccaagcgcccgccatgcgcgctgcccgcgccgcgccgctgctccagctgctgctcctgctggggccgtggctggaggctgcgggcgttgcggagtcgccgctgcccgccgtggtccttgccatcctggcccgcaatgccgaacactcgctgccccactacctgggcgctctggagcggctggactacccccgggccaggatggccctctggtgagagacccgggcattggcaccgagtgggcacctaacccccagcttcgcagatggcccccgcccccggcggccctgtctgctcgctccctgcccagacaccacctagacaggcccctcccctcacagacggccctgccagcccgagccgccagagaggaccccgagccccctgctgggagacgacagacctctgaggccacaggccgacgcgggacacccacccctccttctggtcccctactccttcctcttggggccttccctgggtgtaggttgggcccagccagcccttttcaccccagccttcagggcccagctcaaccccagtgggacctgtggttggctggatttgaagaggagcagacaggaacctctgaagtccactggggcccaacgtggcagggatcgaccacgctggaggcttccgggcacaggttgggggtgccatcagcactgggctccgggctgtgcaggggagtcagaccggcccccccaccgcccccgtgctggggccagctctcttggtagatcttggtagaggggcgggatcctgtcagccaagggcagtcccccttcctggagcctctcccctctggcatctctgtacccccagggcactgggatcgaaggccacaacccctggtctgtagacaccagaacagggaggagtccctggctgaggttgggggtaaactgagaaaaatgacaagccaccctcttcaacacaccacagttgggctgggggggtggagccctggcctggggaggccgcccacaattaccacagtttgggagtttgttagttcccacccctgtaagacttgacacgtagtcttcatttctggggaattggcttaaaggggcagcatcacccaaaacctgggcacttggctaaacccccacctctgttatgggggccccttccccaggagaggggaggctgtgccccatgacagcagagcttggacccatctgcattcttagggacgcttagagcatggtttggtccttattacaacctgggggtggaggaaagcagcagctcttctgtctagtccccattcagagagggacaggggctggcctgtggtcacacagccacaggtcacataggtaggtatctgcccacctaacgaaggtaaccagggaatgcaccaggtgtgatccttaaagtcgaggtacttttcatctttcaaaatgcattcgttggccaggtgtggtggctcacgcctgtaatttcagcactttgggaggccgaagtgggcagatcacctgaggtgaggagttcaagaccagcctggctaacatggtgaaaccccatctctactaaacaaacaaaaattagccgggcatggtggtgcacacctgtaatcccaggtactcaggaggctgaggcaggagaatcacttgaacccgggaggcggaggttgcagtgagtcgagatcataccactgcactacagcctgggcgacagagcaagattccatctcaaaaaaaatgcattattcttctcttatctttgtccatgacataagcaggacagcttaagttatagagggaggacgtgaagcccagagaaagatgggacttgcctgaggtcacacagcaggtcacagaactgtggtggggacctggctgtgctgcctccagcctctctgctgtagcacacctacccttcactgttccaaggagagctcgacctcaaaggtgttagtgctttggggtcaaggctgccttggggttcaatcctgtggctgtgccccctcagccttttttcttcccgtccccaggtgtgccacggaccacaatgtggacaacaccacagagatgctgcaggagtggctggcggctgtgggcgatgactatgctgctgtggtctggaggcctgagggcgagcccaggtggtgatctgaggggaagggtgctggggaagatggagaacagctgcagcccagagaggaaaagggacagcccagagccacagcctccaagccagggctctgtccactgccctgcagagagggaggggcatgtaccccatgggaacatctcacctctatcccctcaggttctacccagatgaagagggtcccaagcactggaccaaagaaaggcaccagtttctgatggagctgaagcaggaagccctcacctttgccaggaactggggggccgactatatcctggtgaggaagtctggctagaatcgggcttctgaaaggcggtagtatccgtccctgatagaaatctgggtataggctgggtgcagtggctcacgcctataatcctagcactttgggaggccaaggcaggtggatcacctgaggtcagaagttcgagaccagcctggccaacatggtgataccccatctctactaaaaatacaataattagctgggcgtggtcgcaggcgcctgtaattccagctgcttgggaggctgaggcatgagaatggcatgaacctgggaggtagaggttgcactgagctgaaatcatgccactgcattccagcctgggtgacaagagtgaaactcagtctcaaaaaaaaaaaaaaaagaaaaagaaatctgaatgtgactgacccacccgaaggctggatccttcggcaggctatctgggccagagcccagaccagatgttcagattggatccctatgttaaaagctcagactaggtactaagcctggacccctcagatagatcccgttgtatacactttactgagcctcgatttctgggctagagcccagggtataaattgagcctggatctctgaactagagctcagagtaggtgtttggatccattttctaagccagatcccagataaaggtcttagatcagtaactcaggtataatctctggacccagtccctgagtcagtgccccagactagagccttggtccagaaacagatgtactgagtttgtgagacctctgtaagagcattcccactggatcctaggagccacgctgggtctctggcaggaccactcagtgaactccttggggggctgcagcccaggcagggctggagcctgtgacgtcccctcctcaaagtttgcagacacagacaacattctgaccaacaatcagactctgcggcttctcatggggcaggggcttccagtggtggccccaatgctggactcccagacctactactccaacttctggtgtgggatcaccccccaggtgaggccgggatgggggccttgggtggactgaggtcctggaaggagggacgtggagagcagagagcctgaggccttggggtctgtgggcaggggcaggggagccctctcacagcccaaagcatcccttttccccagggctactaccgccgcacagccgagtacttccccaccaagaaccgccagcgccggggctgcttccgtgtccccatggtccactccaccttccttgcatccctgcgggctgaaggggcagaccagcttgctttctacccgccacatcccaactacacttggcctttcgacgacatcatcgtcttcgcctatgcctgccaggctgctggtgaggaccagccctcctttagcattccttggaggcctctgcacatttgcacatgctattccagctgcttaccatgcccttccctactctgcatttcatcctgttaacccatgagttacaactttgggtcatgagttttcttttctctctctttttttttttttttggtgtgatctcggctcactgcaaactctgcctcccgggttcaaatgatttcctgcctcagcttcccgagtagctgggattacaggcacccgccaccacacccagctaatttttgtatttttagtagagacggggttttgccatgttggtcaggctggtctcaaaactcctgagctcaggtgatccacccgcctcggcctcccaaagtactggcattacaggtgtgagccacccgcccagccagtggttacttttaagatgaaaggttttttgttgttgttgttgttgttgtttttgggacagagtctcactctgtcgcccaggctggagtgcagtggccgatcttggctcactgcaagctccgcctcccgggttcaagccattctcctgcctcagcctcccgagtagctgggactacaggcgcccaccaccacgcccggctaatttttgtatttgtagtagagatggggtttcaccgtgttaaccaggatggtctcgatctcctgacctcgtgatctgcccgcctcggcctcccaaagtgctgggattacaggcgtgagccaccgcgcccagccaagatgaaagttactagaaagagtttgggtatggccaggcaaggtgactcagaccctaatctcaaagtcttgggaagctgaggctggaggggaaatcacttgagctcaggagttcgagaccagcctggacaacatagcaagacctcatctcttttctgccctttttttttttttgagatggagttttgctcttgttgcccaggctggagtgcaatggcgtgatcttggctcactgcaacctctgccttccgggttcaagcagttctcctgcctcagcctcccgagtagctgggattacaggcatgcactgccacgcctgggtaattttgtgtttttagtagagacggggtttctccgtgttggtcagcctcgtctcgaactcctgacctcaggtgatctgcccgcctcagcctcccaaagtgctgagattacaggcatgggccactgagcccagcccagccttttttttttttttttttttttgagacggagtcttgctctgtggctcccaggctagagtgcagtggcacaatctcagctcactacagtgttgacctcccccacctcagcctcccacgtagctgggaccacaggtgcacaccaccatgcccagctaatttttgtattttttgtagagatggggttttgccgtgttgcccaggctggtcttgaactcctgggctcaagtgatctgcccccgcagcctcccaaagtgctacaattacaggcgtgagccaccgcccccggctgcgagatcccatctctacaaaaaaatttaaaaattaacttggcgtgttggcccacgcctgtagtcccagcttcctgggaggctgaggcaggaggatcgcttgagcccaggaggtagagactgcagtaaactgtgatcatgccactgtactccaccttgggcaacacaagatgagaccctgtctgaaaaaaaacagagagtaagaaagtgtttgggtttggatggaataaatccagtcctggccaggtgcggtggctcacgcctgtaatctaagcactttgggaggccgaggcaggtggatcacgaggtcaagagattgagaccatcttaagacggtgaaaccccgtctctactaaaaatacgaaaaattagccaggcatggtggcgggtgcctatagtcccagctactcgggaggctgaggcaggagaatggtgtgaacgcaggaggcagagcttgcagtgagccgagatcgcgccactgcactccagcctgggcgacagagcgagactctgtcttaaaaaaaaaaaaaaatccagtcctgaggatgagagggaggggtggagacactgatgttggagtgaagctcttgagaaggctgcagagaatatgtaattccgaccctgaagactatctggtgcatggagaagaactttgcaggtgctcagggtaaattagaggtgacgatttaatcaagtaatcagtggcagccggtaaggaggatgttgtaattctttgttttgtgctggagaagtctgcagtgtgcagacatgcaagaagaaatcttaccaagtgcaaaaagtgagtgaaggtgaaacaattggaggggaaaacacaagaggaaacaaaagcattctgttatttttaatttgctagccctacttcaagcgacagccgttgttaattggtcaatggtttgaaggaattcagtctctaacagccagatactacatcccggctctgggccaggctctgtgctcaatgctgggaatagggttagcttttatttgttttttgtttgtttttttttaagacagagctttgttctgtcgcctaggctggagtgcagtggcgcgattttggctcactgcaacctctgcctcccgggttcaagtgattctcctgcctcagcctcctaagtagatgggattacgggcggccaccaccacagccggttaatttttgtatttttagtagagatggggtttcaccatgttggccaggctggtcttgaactcctgacctcaaatgatctgcctgcctgggcttcccaaagtgctgggattacaggcgtgagctactgtgccccgcctaggttagctttttaattggcactgtgtgcctgcccctgaggataattataataaaggtaacaaatattggccgggtgcagtggctcacgcctgtaatcccagcactttggatggcctagggtgggtggatcacttcaggccaggagttcgagaccatcctggccaacatggcgaaactccgtctctactaaaaatacaaaaattagctggatgtggtggtgcacacctgtattcccagctactcaggaggctgaggcaggagaattgctcaaacctgggagacagaggttgtaatgagccaagatcgcaccattgcactccagcctcggtgacagagcaggactccatctcaaaaaaaaaaaaaaggtaacaaatattgaagccgggggaaggccactctggctgccaggtgaaagacatcgtggagaggagccccagagggtgtgaggtgaagtggaggggtgtggggaaaaggcgatggcccttggatccaggtggggtggtggggatcaggagaggtggggggatttaggagacagagcagtggggctcactggcaccctgtggctgtgatgggtaggagtttgtctgctcctgcctcaccttgatgccctgagggcagggactcagtcttgctcactgccgtaaccctggctcccagcgggtgccctggacaggtatattgaatgaatgaaccatttcagtagaaagaccccttagatattgtgtgagccaagccctttctccctctggtcccacaggtggggaaactgagtcccagagaagactgacatgttgggtcactggcagtgctgggcctaggacctttcagctgggttctgagagccccaccctccactgcagctctcactcagcctgtctctgcaggggtctccgtccacgtgtgcaatgagcaccgttatgggtacatgaatgtgccggtgaaatcccaccaggggctggaagacgagagggtcaacttcatccacctgatcttagaagcactaggtgagggctggggaactgttccacccacctgctgccggggctccctgcctccccacggtgcccctttccctaggccctggacggagcgggcattggccttggggttccagctttgtccctaactcgttccatgactctgagaaagtccctttccctgttgggccttagtctagcatccctacaatgggggcaggtggatcctgtgatctctgaggtcccgtcctgtggggtgttctgccaaagggggcaggaatgaggctgggggctaggacttcagggtgactgctaacaggagtcagtagggactcgtgcttggggtgtgcttccctttgcagtggacggcccccgcatgcaggcctcagctcatgtgactcggccctctaagaggcccagcaagatagggtttgacgaggtaagtcccccagcctgtgggctcgctgttaggaggtggatgggccctcctcttccgctcccttgcacttaccgcccacccccctgcctcctccaggtctttgtcatcagcctggctcgcaggcctgaccgtcgggaacgcatgctcgcctcgctctgggagatggagatctctgggagggtggtggacgctgtggatggctggtgagcctgcctggtggggggggccctgtgcgcttggggaagcagtgtggtccatctcctagcccgctaggactgggaaaagcagacaggttgaatgagtttcctgtcccatgtagtatccaaatagggtctgagtaatatcctctcagggagttccggagcagacacacgtgggagaagatgccctcctgctgctcaccagaggaggagagcacagtggctgaggctccagggcctgggttccagctctaccagttactgaatgtgtgacctccagccagctacccccatctctcagcccgtttgtataaacagcagataactgtgcccttctcttagggttttgtgagtttagtgaagttagccagggccgggcacatagtttccaaaggcttaggtgtctcccttattattactctccatcctggacttgagctactgatgcgtggggattaggaaaggccagccatgttcccccgaggaacccagaggctaggcttctccagccaccaggggtcctatggccccatatgtcggctgccatttgcttcaagtactcagctctttttattttttttttagagacagcgtctccgtctgttgccctccgtctgttgcccaggctggagtgcggtgccacaaacatggctcactgctgccttaaactcctgggctcaagtaatcctcccacctcagccttctgagtaactgggactataggtgtgcactatcacatccagctaattaaaaagaatttttttttttttttgaggcagagtctcgctctgtcgcccaggcctggagtgcagtggcgcaatcttggctcactgcaacatccgcctcccaggttttaagtgattctcctccctcacctcccaagtagctgtgattacaggcttgcatcaccacacccggattaaaaaaaatgttttgttttgtttttttttcatagagatagggtctcactctgttgcctaggctggtcttgaactcctggcctcaagtgaccgtcctgcctcagcctcctgaataacggactacaggcatgcaccaccatgtccacctaatgaaaaaaaatttttgactgggcacggtggctcatgcctgtaatcccagcactctgggaggttatggatggatcacctgaggtcaggagttcgagaccagcctggccaaccaacatggtgaaaccccctctctactaaaagtacaaaaattagccaggtgtggtagtgggtgcctgtaatctcagctacttgggaggctgagtcaggagaactgctggaacccaggaggcagaggttgcagtgagccgagattgtgccattgcactccagcctgggccgacaacagtgagactctgtctcaaaaaaaattttttttttgagagatggggtttttctctgttgccaaggctggtcttgaactcctggcctcaagcaatcctcccaccttggcctcccaaagcactgggattacaggtgtgagacaccacatcccccgaggtctcttgaccataggctatccatcctttgcttgggcctctgcccaagaagtatctatcatgttcccacattcttcctagagtgcctccccctcaggcagccccctaccatcccaccctttcctcaagggtcacccctgtcttatcatattaggacatgtcctaatagttatcctctcagaactcccgaggtggctgggcgtggtggctcatgcctgtaatcccagcactttgggaggctgaggtgggtggatcacctgaggtcaggagttcgagaccagcctggccaacatggtgaaaccccatctctactaaaaaaaaaaaaaaaacattagctgggcacctgtaatctcagctacttgtgaggctgaggcaggaaaatcacttgaacctgggaggtagaggtttcagtgagctgagatggtgccactgcactccagcctgggcaacaggggctccagttccccaggtccagtcccttgacagcttcaggtcacacaaaggagttacaaggcagaaaccttcttcaaacccgactccagtgtgactgtccccaacatgcacaggcctggcccctctggaggggtctctggcaggcacccctcaccccgccacacctgtgtccctcaggatgctcaacagcagtgccatcaggaacctcggcgtagacctgctcccgggctaccaggacccttactcgggccgcactctgaccaagggcgaggtgggctgcttcctcagccattactccatctgggaagaggtgagggtgcctgcttcctccatccacagccttcggggagaacggggccagtttgttctattcactgctctgtgaacgagtgcgtgaatgaagacattcatcaaaacctggccagcagctttcaatctcctctgtgttcaacaccccagtgggcaccactaagcggtgcttgttttcattctgcagtctctcttgagcatctactatgtgctaggagatattctgctctgagaacacagaggaggacaggaacaatgcatgtctgctccttcctgcaataaagggatccccctggggctcagggaccagagcgggattatggaaatcaaaaccaagcttgcagtggaggggagaggtatgggccactttgagaggtgcctcgtgtgggagggggtcagaatggacctcaccattgaggggccgggagaagaggcttctaggcagaagagaacagtgggtgccaaggccctgaggcaggaaggtgtttaggagcagaaagaaggaagcctggggcttagcatgtgctcagtacttggccaagaagcctcggcccaggggctgggagtgtgagcgcaggaaagaggttgctggacacggcaggagagaatgggaactgggccctccaagggcagcccttccaggagatgggacatggattccttgtttgtgttctctgctatagccaaatatatgtgcacgtgtatgtgagcattatgggtttttgttttgttttgttttctgagatggagtattgctctgtcacccagactggagtgcagtggcacaatcttggctcattgcaacctctgcctcctgggttgaagcggttctcctgtctcagcctcccaagtatctgggattacaggcatgtgccaccacacctggctaatttttctatttttagtagacagggggtttcgccatattggtcaggctggtctcgaacttccaacctcaggtgatctgcccacctcggcctcccaaagtgctggaattacaggcttgagtcaccatgcccagcctatgttggcttttttaccgtccctgaacaaattggaggatgacatggttcactacttttttttttttttttttttttgagacagggtattgctctggcacccaggcgggagtgcagtggcgtgatcttggctcactgcagcctggacctcccgggctcaagcaattatcccacctcagcacccccgaggagctgaaactacaggcgcgcaccaccacacccagctaaattttgtattttttgtagagacagggtttcgccatgttggccaggctgatctcaaactcctgagctcaagtgattccacccacctcagcctccaaaagtgctggaattacaggcatgagccaccgctcctggcttcactactttctgagctgatttccttttcacagaagttatcaaaagtagttttccaaaagttattctaaagtaacttttccaaaagttatcaaaagtactttttcttttggatattcggggctggggtcttcccaccccccacccagcccagcttcctttagaaaatagcaggaggccaggccaggtgcggtggctcacgcctgtaatcccagctgaggcagacagatcacgaggtcaggagttcaagaccagcctggccaacgtggtgaaaccccgtctctactaaaaatacaaaaattagcccggcgttggccgggcgccgtggctcacgcctgtaatcccagcactttgggaggccgaggcgggtggatcacgaggtcaggagatcgagaccatcctggctaacacggtgaaaccctgtctctactaaaaatacaaaaaaattagccaggcgtggtggcggcgcctgtagtcccagctactcgggaggctgaggcaggagaatggcgtgaacccaggaggcggagcatgcagtgagccgagattgtgccactgcactccagcccgggcgacagagcaaaactccgtctcaaaaaaaaaaaaaaaaaaaaaaattagcccggtgtggtggtgggcacctgtaatcccagctacttgggaggctgaggcaggagaatcacttgaacccgggaggcagaggttgcagtgagccaagaccatcttttgatgggaactgcaagccacttccccgcccccagagagttgggcttctgggcccagccaccatctgtcatgcttgcactcaggcagctggaggagtgggaggggagatggctcctggtcttggccatggctgctttggcctccaccgttcctgctcctcttccatgcagccccctgacttggggggccatttcactccagtctgggcaacaagagtgaaacttcgtctcaaaaaaaaaggaaaattgcaggaggccaaagtgacaagctgggccctggtgttcagcagatgcgggttcatatcccagctctgccacttcctggctgtgtgtccttggacaggcagtttcccatccctgcatgtccacctccttcctgcgattgaggatcatcatctcctgcctcctgagggcccctgcagatacgcagtggcacagccctggggcacagtagcactcagggaatgtagcaagggccacggttaccatcatgattctatctggagatcctcaaatgccagagcgaggttgggatttccggtcccaggcagtggggcccccagcaggctttggggcaactgcatgatgtggccaggccaactgaggccaggcagaggctgtgagcttcagcgtggagggaggggggttgtttaactccgaagagccatctcccaccccattgtatgccacaggtggttgccaggggcctggcccgggtcctggtgtttgaggatgacgtgcgctttgagagcaacttcagggggcggctggagcggctgatggaggatgtggaggcagagaaactgtcttgggacctgatgtaggcagcctgcaccctcagggacaagggggcagggtgggcctccggagtctgccttttcctgcttgggaccctggccggcccatcccctgagagcctggccctgtaggagcgggtgtgggagggtcccatgacacccaggacctaagtgactcctgggccccttggtgtcacttacagctacctcggacggaagcaggtgaaccctgagaaggagacggccgtggaggggctgccgggcctggtggtggctgggtactcctactggacgctggcctatgccctgcgtctggcgggtgcccgcaagctgctggcctcacagcctctgcgccgcatgctgcccgtggacgagttcctgcccatcatgttcgaccagcaccccaagtgaggctctgatgggggccgggcatggcagggcagaggcgtcccctccaggaactcacctcagtcagcaggaagtcccctcacctggcagatggggagactgggactggcaaggccaagccacttggcccaggtcaccaaggagtggctcagcctagccttagagtcagtccattctcggtgtgtactttgcacagtgcatgcaggcttttttttgaaatggagtcttgctctgttgcccaggctagaatgcagtggcatgattttgactcactgcaccttctgcctcccaggttcaagcaattctgctgcctcagcctcctgagtagctgggattacagggaagtgccaccacaccctgctaatttttatttatttatttatttatttatttttgagatggagttttgcactgtcacccagtgcggtgcagtggcgcgatcttggctcactgcaacctccgcctcccaggttcaactgattttcctgcctcagcctcctgagtagctgggattacaggtgcctgccaccacaccaagctaacttttttgtatttttagtagagacagggtttctccatgttggccaggctggtgtcgaactccttgacctcaagtgatctgcctgcctgggcctcccaaagtgccgggattacaggcatgagccactgtacccagcctcaatttttgtgtttttagtagagatggggttttgccatgttggtcaggctagtcttgaactcccgacttcaggtgatccgcccgtctcggcttcccaaagtgctgggattataggcatgagccactgcgctcggctgcatgcagtttttaatcaaatgacttccttgttctcagcctctgtttcctcatctggaaaatggaggtagtagaagtcccactgctcagggccgctgtgaggactagatggcggggagtgaggtgctttgggcaggcaaggtgcctggctccgggcaggcatgtgtccggggagtaggggcccgcctcaatccccctgagctatcctctcaccttacagcgagcagtacaaggcacacttctggccacgggacctggtggccttctccgcccagcccctgctcgctgcccctacccactatgccggggacgccgagtggctcagtgacacggagacatcctctccatgggatgatgacagcggccgcctcatcagctggagcggctcccaaaagaccctgcgcagcccccgcctggacctgactggcagcagcgggcacagcctccaaccccagccccgagatgagctctaggtgaggccagggcgggaagaggccccagccccgtagaccttggcttgctctcccctttgatggcataactgtgtctggggctgttttccccttctcagccttctctctccctctccatctctagctttgcctttatgtttgttgttgttgttgtttgtttgttttttttagacggagtctcgctctgtcgcccaggctggagtgcagtggcgtgattttggctcactgcaacctctgcctctcgggctcaagagattctcctgcctcagcctccccagtaactgggattacaggcacccaccacaaggcctggctaatttttctatttttatttttatttatttatttattttgagatggagtcttgctcttttgcccaggctggagtgcagtggcatgatctcagctcactgcaacctctgcctcccgcgtcccggattcaagcgattctcctgtctcagcctcccgagtagttgggactacaggcgcccaccaccacgtccggctaaattttgtatttttagtagagacagggtttcaccatgttggccaggctggtcttgaactcctgacctgaggtgatctgcccgcctcagcttcccaatgtgctgggattacaggcgtgagccaccgcgcctggccttttgtatttttagtagagacagggtgtcatcatgttggccaggctggttttcaactcctgacctcaaatgatccagccgtctcggtctcccaaagtgctggggattacaggcgtgagccactgtgcctggcctctgtgtctgtctataattgtaccttcagctgtctccgcatccctctctagctttttccctctctgtctgtctctgcccctgttttcctatatctgtcagtgtctgtctgtctctgattctgtctgactctaattctctttctcttcctgctcctcctgtcccaccaggtccaggtgatgactgcaaagcagtgtccaggagcaggccactactgcccagagagcagaggaggaggttgttggcagggactgcagatcctgtcagacctggccaccaccttgggcatggccactctgccctctggacctgtctttcatcgggagaaaccactcagagatggatcccattccctaaaggtctcacagcaaaggagcaggactcccaggcccctgtaccctgcctggcctgattcagggccttgtggcccccagcttctgtttcaagctgggcagaccccaggatcccttccctccctaaggactcagctgaggggcccctctgcccccttctacctccacctcagcaccctcccccagcttgatgtttgggtctccccagcaccctcctccctggccggtgcaaagtacagggaggtaaagcaggacccttgcagacatgttgcccagcacacagtaggccctcaataaaagccatttgcactttaaatatatatatgtatgtatatatatgtatatatatatatatatatatatgt

SEQ ID NO: 2852 - DNA, 892 bp, Homo sapiens
gagcaattggagggacagagaggggaggacaggtgaggagtcaggccgatccagcatcacctctgtgctgggtgatcttgggtgggtgccatcccttccctgggccttagtctactcttcggtcattgtggctggttgggtatagagtggcctagcctgagcccggctcacagtgagtgctcacctgttggggctgatgtggtcatccccgaagtcattaccagcctcaccttgctggtcagggtgggcccagccagtccaagggctgctgatgtcccccggccctttggatcatctcttgtgcagctgaaaccctggcttaggggaagaggaaccgcctgggaggggctgggggagatcctgggttcccctctggcactaaccaatgtggccaccagagggcgcaaggtggcagagcctggacttggccaggatgctctctgctgggttggggccaacaccaggaaggaagcatgggccatagggaagctcccattggtgctggggcaacccgcagcagctctgcgtcttctgctcttctgatgggaactgcaggcctctcccctggccccagagagtcgggcttctgggcccagccgctgtctgtcatgcctgcactcaggcagctggaggggtgggaggggagatggctcctggccttggccatggctgctttggcttccaccgttcctgctcctcttccatgtggccccctgacttggttgtgtgagcactccagtcctggcagagcctgacaggcactccctgaggttggggtatcccttggctctgtcctggggttgaggtccaggacctggcacggctgtgagaaggaccttgggctggagctgtggactcggtgctttattcgttctaagatgaaagtcattca

SEQ ID NO: 2853 - DNA, 4513 bp, Homo sapiens
ggcagtcggtcgtgggtacgcggctcctgtgggggaggggggagctatgggagggggcgggaattcccgactctaggccggaagcgcgcggagaccatgtagtgagaccctcgcgaggtgagtgcgggctgtctggcagcggggtccatgtcggctgcccaggcctccccgggcccgggaacaggagtcccagctcacgcattcttcatctgcttcccgcgacgcttggcggcctcgcaccccgcctcctggagcccggactttcaggcaccgccctcagtgtcgcctcagtccgtcccgggaccgcagactcttagggcccctctctttggccatctgcctctaggtcccatcctggggcctgaagcgcttgttctctgcgctgggaaaaggggaacgatggagcgatccagcacccaaacttaccctgtccaggtggcccacgaagctacccaagacatctctgcacagccctagcctttttggcttcacccactccgttcgggagttggggacccggcctctacattccttaggggaactccagctccaggtcctatttggaggcggctcctagtttcctagttttctgggggcaccaggtgaaagggtgatgagatatccatacagcctttctcatgcctcggtttcccccgtgcagtctccctgaataagtcacttgggaaagaaagtgtgagaagagaggaatgttcctggtacaggagtagatgagtcaccctgggtaggggaaggtcacaaagtggctggggccagggagctgcactctgctgaccaagcttccccattccttgccccatcttcctttgcatgatttttcccaaccactctggtctgtcttcctaggtctgagagtcactggagctaccagaagcatcatggggccctggggagagccagagctcctggtgtggcgccccgaggcggtagcttcagagcctccagtgcctgtggggctggaggtgaagttgggggccctggtgctgctgctggtgctcaccctcctctgcagcctggtgcccatctgtgtgctgcgccggccaggagctaaccatgaaggctcaggtaagcctctccttttccccacactgctatgaatgcttggcttagggagggctctggggctggcggggagtgaccaaaggaggagggaaaggcaagggtagccattgtttgggttggggtggtcggccctggagggggtttgtttgcttattcccctctgtgcttcacccctacccagcttcccgccagaaagccctgagcctagtaagctgtttcgcggggggcgtctttttggccacttgtctcctggacctgctgcctgactacctggctgccatagatgaggccctggcagccttgcacgtgacggtgagcactggcctgggcatgtgacttgcgggaggggaatcacacacctctgggagtgttggtttgtggagattgattcatgtgccactccatgactgtgtggaagacttttggcatgtggtatgaattgtgatttttggttatggggcataattctttctatgtgttccctcccccttccccattccctgtgtgacccctacattcccgttgagacagtaagacactttttctcaggtgtgtgacttgctctatgggttctcagttctagctaccagcaagtgctccaagaatcatcttcactctctcaccactttcctaaagggctggagatagaggtctctgtaggcctgagaaggataggaagcgattccctgggtcttggtgttgctaacctttttaggctttggcccaaggaagtgggctgtgaggaatgatcaagtccacggcataggacttggtttattataggaaaaactgaggccgttggatagtggggcaggaaagtcatcctgggctctttccttttttcctctaaaactgaggaagtaacactggatgtatccctttgtgtgtctgtgactgagtgacctgtgtttccgtgtgactgcgtataagcctgaatgtcctgtgatatgtggctctatgtatgagtatttggggagatgggcaatgtgtgaccttttcatgtatgtctacatcagtgactctcaactaggagtgtggctttgcccctcaggaaacatttggtaatgtctggggatatttttagttgtcacaatggggagggggatggagggaacattgtgcctgctattggcatctggtaagtagagatcagaaatgctgttaaacaatctacagtgcacaagacagctcccatgacaaagaattatctggcccaaaatgtttttgtttgtttgtttttgttttgttttgtttttgagaaagagtcttgctctgttgcccaggctggagtgcagtggcacaatctcgactcactgcaatctctggctcctgggttcaagtgattctcctggctcagactcctgagtagctgggattacaggcatccaccaccacaccctgccaatttttgtatttttagtagagacagggtttcaccatgttggccaggctggtctcaaactcctgacctcaagtgatcttcccactttggtcttccaaagtgctgggattataggcatgagccactgcccctggccccaaaatgttaatagttccaaagctgagaaactttggtctacacgtaacactgtgagtgacaccataatctgtgtgtacgtatcattctgtgtcagtgttaccaattcactctatctttgtgtgactgagagtagccctgtgtctgtgtcagaccctaggtctgtgtaactgggctttcaccagattttgcatctcactcttccttccctgaacattttgctgctgcttctgcccacagctccagttcccactgcaagagttcatcctggccatgggcttcttcctggtcctggtgatggagcagatcacactggcttacaaggagcagtcagggccgtcacctctggaggaaacaagggctctgctgggaacagtgaatggtgggccgcagcattggcatgatgggccaggggtcccacaggcgagtggagccccagcaaccccctcagccttgcgtgcctgtgtactggtgttctccctggccctccactccgtgttcgaggggctggcggtagggctgcagcgagaccgggctcgggccatggagctgtgcctggctttgctgctccacaagggcatcctggctgtcagcctgtccctgcggctgttgcagagccaccttagggcacaggtggtggctggctgtgggatcctcttctcatgcatgacacctctaggcatcgggctgggtgcagctctggcagagtcggcaggacctctgcaccagctggcccagtctgtgctagagggcatggcagctggcacctttctctatatcacctttctggaaatcctgccccaggagctggccagttctgagcaaaggatcctcaaggtcattctgctcctagcaggctttgccctgctcactggcctgctcttcatccaaatctagggggcttcaagagaggggcaggggagattgatgatcaggtgcccctgttctcccttccctcccccagttgtggggaataggaaggaaaggggaagggaaatactgaggaccaaaaagttctctgggagctaaagatagagcctttggggctatctgactaatgagagggaagtgggcagacaagaggctggccccagtcccaaggaacaagagatggtcaagtcgctagagacatatcaggggacattaggattggggaagacacttgactgctagaatcagaggttggacactatacataaggacaggctcacatgggaggctggaggtgggtacccagctgctgtggaacgggtatggacaggtcataaacctagagtcagtgtcctgttggtcctagcccatttcagcaccctgccacttggagtggacccctcctactcttcttagcgcctaccctcatacctatctccctcctcccatctcctaggggactggcgccaaatggtctctccctgccaattttggtatcttctctggcctctccagtcctgcttactcctctatttttaaagtgccaaacaaatccccttcctctttctcaaagcacagtaatgtggcactgagccctacccagcacctcagtgaagggggcctgcttgctctttattttggtcccggatcctggggtggggcagaaatattttctgggctggggtaggaggaaggttgttgcagccatctactgctgctgtaccctaggaatatggggacatggacatggtgtcccatgcccagatgataaacactgagctgccaaaacatttttttaaatacacccgaggagcccaagggggaagggcaatgcctacccccagcgttatttttggggagggagggctgtgcatagggacatattctttagaatctattttattaactgacctgttttgggacctgttacccaaataaaagatgtttctagacatctgtacagta

SEQ ID NO: 2854 - DNA, 839 bp, Homo sapiens
gtccccccttttttttttcttttttaaaattaattttcctgtaggaagcaagatcccatctgtcccttctttaggcaatgaagcttttttcacctttgcataaaagaacagctgagccccctttttaaattttcttttgtcttaccgtcccttgaggctagaagaggattctcaaggcacagagttgtgggccacaagaatccaggttgaggaaacggtgaaagtcctgagctgaaacaactaccttggggcattcaaggaacagcaaacagcaaaccgaccggcgagggtggcgggagctgggctggaaatcaggtgggagaaccggccagacgcccgcaggcgcggtacgcagatatcctggaatgcgctgggggctcttccctgggcgcggcttcagcaccccgcattccggtcccaccacgtccccacccacctggagaaggcggaggctgcactgagtgccataagtagtcgagaagggatgattttcaagacataccctctctttgctttcccccctttccaattctgccttgtctttttccttgttgtgggtgctggtgagggaaagcagtcaaggaagttggtcccaagaggggaatgctttcccttgggcgccaagaggcactgacgaggtgtcagagccttctgagggacagatgagactttggcccaaggccaggaagatgttttcagatgtgggccggaagacttgacaatgcggggtctccctcttttaaaaatatccatataatcaaagcctttgttgactggcccgctccggcccctcagtcctccacagatgcgccccagggccccagccccgaggtcctttt

SEQ ID NO: 2855 - DNA, 11138 bp, Homo sapiens
tactcttcccagcttgcacctctcagggagtagccgagagggtggagccaagtccccagtttccggagtcagcagggctgctgggaagtggagtccgtttcctcctagtgctgcgtgactggggatgtgaaggagtctcgtaaacaaactacaattcccggcggcccccgcgcgcaacaggtcagggctaggctggggccgggttcgcggtgctcgctgaggcggcggtggctacggctggaggagccgggccgaggccgcggcggaggccgcggctggtactgggagggtggcagggagggacggggaaggaagatggcgacgtcgggggcgaacgggcctggttcggccacggcctcggcttccaatccgcgcaaatttagtgagaagattgcgctgcagaagcagcgtcaggccgaggagacggcggccttcgaggaggtgatgatggacatcggctccacccgggtgaggggccgcgccggggagccggagcagagctgagcagttacggagcggagaccggagaggcggggcgggggcgggcgccgcagcgaaggaggcggaacagagcaggggacgcgggcgccgccgtttgggaggcgcaggttgagggccgaggggcaggaagaaggattttgccgggggagaccgaaacaccggagaggttcggggtgtagaggcgactgggggccgagtacgtgaggtgggagtgggcggagaggggagatgaagtccggcggaggtaggaggtgagtggtccttgtgcatccctgacggagtcccctcgaggacgctactgaagcatgcctggtattggggtatggcctgggaggagggctgcttgtctgtaacctggctcctctgagtttgtgatctcctccaaactggtccctctgccttctgcgctttggtgcccccgggaaagggccccttgagtggtttgaacgagcggtgctgtgtatagtggggcaggaagtcccctcctgcgtcccgtccttttgcttcctttttcaaatacttcttgtggtttcctgacgtgaatgaaggtgaggtccattgcttggtgttttgtcctggcctccttggaggagaggtagggttttgaatccgacaactgggtaaccgtccgaccataagttgtgtggaactctatggtttgctgagctttctagggagttggctgctttgtgggttagtgtgtagggtgccttggagggtcttctatgtgttgagaatattcattcctaggagttcttgaaagaactttcaggcctctgccaggctgcctctgaagcccccctggcttggtttcttgctttccaaggctggaggtcagagggaccaaggggtaggagtccgcctaggtggtatgcagtcttaatttagggacacattcttctaaaacaacagtaggtaaggatattgcaatgattcctcatggcagagagctagaaggaatttaaggattgatggtggaacattactacaacatctctagcctttttctgctggtctgactgtggttgcatttatgactgtgactctggttgtatttttgtgtgtatcccccttgactctgttacttttttttttttctcgtcctttcccctttgagtctctagggactatgtgccctagtttgtgggagtcagaagttaggtggggaggcaaatctgggagggtgtctgtgcacgcatgtgcacacttaaatgcatgtgtgtgcataacccactgtaaccattgtgaggattattatctaactgtagactgctcccctttaggagctttttcatcatgttggggacagagacaggaagatgggaggctgatcttgatagcgtgaggccctgccctcaggactgtgattctagcagaggcatggtgggatcttagggctcgtatgtgcaaagaaaggctgtgcgaaactcaaaagctggggcttctctttacggtgcctcgatctcttaaaaggccccttctacccaccttgctcctattggttaatttctcagctacacagaaaagtctagtgggcatacatggccaggggacccaaaagtctagagctagggacaagagatctgggactcagcctgttatctggccaggtgggagggctcatttgagacagagatggccatgggaggctataccactgagatactggggttgccatatatgagacctcaagtggtcttcaagtggtccagaggtcagcacagtgctcactaggctgacctcctggaacagaatgtcagttctgatgttggcttctgtacaagagtgtgaccctggaagctcttagaacttgcccctcctcagctgccctcctccccatggccttgccctgggcctgtttatttggctggtcgcaggggctgagccttggaaatagatgctcacctctcacagagacaggatgtctgtacacaggctaaacccatgccaggctgtcttacgcctatgccagacatagctccccaaagtgaggatgagaccaggaagatggccctggcccatgctggagtgggctgctgctctctgtccaccctccttctccaggcttccctgccaattcaagagccttaggattcagtggaagaatgtcccttggttttggtgctgtttttccagctaggagagctgctattccttggatgttctagtttgggaggtgcaggctttgtgtagccttcctgaggctgggcaagtggcagagcccagaagcctgtgctctccagagtgggaaggaaagaggctggcagtaatggctctgtgacatccacctgtggccttcctcttaatctctcaattagtcctggacgcatctggaaagaaagcagaggttcctaataggcactcccccttgtgagtagcccgggagctcctggcagcccctcagggactctgcttagagtgatgccaaatgagacaggccctcagcagagtatctgtctctgcctggcaggatgatgtcaagcagtagtgatatcattgatgagggcagtctgcagatgggctctggtgggttatttgcaccaaatctcggtggacctttcaaaccccaacactggccttttttttctggcagataatttctttattttttttttaacttttttttttttggagacaggatctcagtctgtcacccaggcggctagagtggagtgacataaacatgtctcactgcagcctctacttcctgggctgaagtgatcctttttttttttttttttttttgagacagagtctctctctgttgcccaggctgcagtgcagtggcacagtctcggcttactgcaacctccacctcccaggttcacgccattctcctgcctcagcctcccgagtaactgggactacaggcgcccgccaccacgcccggctaattttttgtatttttagtagagacagggtttcacggtgttagccaggatggtgtcgatctcctgaccttgtgatccgcctgcctcggcctcccaaagtgctgggattacaggtgtgagctactgtgcctggcctagatattttaaaagcagtggcggcagcagcatatcctggtgacagagatggcaaggatggctgaaggaaatagtgctcaggaccctcctgacattcccacttgttccccatgtctcagttacaggcccaaaaactgcgactggcatacacaaggagctctcattatggtgggtctctgcccaatgttaaccagattggctctggcctggccgagttccaggtgagtagaccccagccagggaggagtggagtttcttaggctgcttcctctgctgacttctgtcctttttggcagagccccctccactcacctttggattcatctcggagcactcggcaccatgggctggtggaacgggtgcagcgagatcctcgaagaatggtgtccccacttcgccgatacacccgccacatatccttcacaggggacttgggagtgtctgaaaggtagtgggatggggttcctcagggactcataggaagcacttgaagtgttgtgcgtcccttccttctcttggagctcttctttacccagcttccctgaaaagcgaccatagcccctgcgtcagcacctgctcctgtgacaaggagttttgctcctgaggctgtgccccctgtctctggctggctctggctgtcttcacatcagcttgctgccagaggcaagccttccttgtctcctgctaaaggagattgggtctcttctcagatttctaagttttcagtctcagagacctgcataactgtctcctccaagccctgcctgaacattctcctggattttttcagcccctttagacctgattccctttttctcttccattctttgatcctattgttgtcccttatagaagaggagaaaggtatgagtttcttgaaacaacttatctgctgccttcattgttctttcctcatttggcctctctcatctgtcctctctacttttttccttaactggtgctgttcacattgacagctctccctatagtcctgcctacttatctcctcccccagagtctagctggcgaaggtaagtgtccagggcgggcagaagctcctgcctactctctgacgtgtttctggaaggagttgccccttctgggttggggctgggattactgggctaaggtttcaacagtacctcttcctataacgccagggctgagagaggtggagacagttggagtaggtgggtcagagtccagccttggccatgttgacactagtggtcaagcctcccagtccagccagagcagaaccaatgggaaccatagccaggctggggtgtgtgtgtaagggggaggggagaatggcagaggggcaggtgaaaatggcaaccttctgtcaagggtgggtgcaagatgtagtgttctggcacttttagatttcttaaactctccccttgtccatctcactttcaatgctcatacccaggaatgctgctgggctccaagattcccattcagctggtcctggcagagagaagtttccagctctcttagattgactgggggaggggtcaatcataggcaggagaagaaccagaaagaaaaggggatgatctgggtgctcagccatctttacttccaccttagctgccccacattttccaacccctatgcccaccttcttgtccactgccagccttcctcctcatgactttgtttttctaccccaggacgatggcctggggcaatttccctgcagagaaggggcagttgtttcgactaccatctgcacttaacaggtgatggcttttgccttctttaggccagatctcttatctgtagtttctggggccctgctccctcacccccaccctgttccagaccagctagtgttttcccttgctgggcagggcttagggaccaggaagactgtcactggtgtcagctcattcctgctccccccataggacaagctctgactctgcccttcatacaagtgtgatgaaccccagtccccaggatacctacccaggccccacacctcccagcatcctgcccagccgacgtgggggtaagtggccctgtcccagggttgggagtaaccatggagctatttatttatttatttatttatttattatttctttcttttttgagacggagtctcactctgtcgcctaggctggagtgcagtggcgtgatctcggctcactgcaacctccgccctccgagttcaagcgattctcctgcctcagcctcctgagtagctgggattacaggcatctgccactgtgcctggctaattttttgtgtttttagtagagatggggtttcaccatcttggccaggctggtcttgaactcctgacctcgtgatccacctgcctcggcctcccaaagtgctgggattacaggcatgagccaccatacccggcctccatggagctatttaaagcaggtaggcaagtgagcactgcagccaatgccactgtatcccttgcaggtattctggatggtgaaatggaccccaaaggtatgtgttcctcactgctgtgggtactgaatgccaaagaatttctgggctggtgttgggattgtgtgcaggttcagggagcaggactccttcccacctgcttctgcttcctgtcctgccttactggctctttctccaactctcccatcaccagtctttctctttcaagtacctgctattgaggagaacttgctagatgacaagcatttgctgaagccatgggatgctaagaaggtaggaggaggccaccgggtgtcacccactagtctctctgctatccccttgccatggggcaggccttccagggttctctgctgagcactgtcctcattttccatattctcccttctctcctcagctatcctcatcctcttcccgacctcggtcctgtgaagtccctggaattaagtaagtactccctgaggttggctgagaggtgggggaaggaagtacagggagatgtaggagactgatctctgctcttccctgaccactgcacccaccctcctatttacatctttctttttctctccttcccctagcatctttccatctcctgaccagcctgccaatgtgcctgtcctcccacctgccatgaacacggggggctccctacctgacctcaccaacctgcactttcccccaccactgcccacccccctggaccctgaagagacagcctaccctagcctgagtgggggcaacagtacctccaatttgacccacaccatgactcacctgggcatcagcaggggcatgggcctgggcccaggctatgatgcaccaggtgagtgactgtcctggccatgtgcccactgggtgctgcctgactggagggatgaaggggaggtaggtttgagcacctgagatcctgctgtgatcacccacaccgcctgtcacctctgcaccccaggattccctcacggcagttctcagccagtgataactggtaggtgtggtgtttcctagaaagaagaggaagggcagtccccagatgggcagtgctgtcagggatagagtagggaggacgttgtgttgccgctttcatagtctggtcactgccacccattctgggtggaaaggggctcagttcccatcagtaatgttggcatctctggttttttgtctgtgcctgcaggacttcattcacctctcagccacccatccctgcagtcctccctaagcaatcccaacctccaggcttccctgagcagtcctcagccccagcttcagggctcccacagccacccctctctgcctgcctcctccttggcccgccatgtactgcccaccacctccctgggccacccctcactcagtgctccggctctctcctcctcctcttcctcctcctccacttcatctcctgttttgggcgccccctcttaccctgcttctacccctggggcctccccccaccaccgccgtgtgcccctcagccccctgagtttgctcgcgggcccagccgacgccagaaggtcccaacagcagctgcccaaacagttttcgccaacaatgtcacccaccttgtcttccatcactcaggtatgcgtggctgccttccctgcatgtctgtctcccttcccttttctcctgccatgttgtttccctcccaccctcctttcctgaaatacctactctatactcatccccttccattcctctgtcctccgcctgccccatcttttatccatcttgtctcctcttgcttcacagtgcaaacccaaacgctgtggttaagcttttttagcttcaaaccctggctccacctcttactagcagtcaccttggacaagttatttaatttctataagcctcagtattttcatttctaaaacaaggatggttcataaggatcaaatgaagtaacatacataaaatacttagcaccacacatagcccaggtatgcttgacaaatagtagcttaccctttccttttatttgcctcctctgttcctgtctgttttatatctgtcttttatctcatgcctctatcttgtcccgtctcctcccctgtatcccctcctaatttcatagaattcgtagaatcagtcaatttcctactgtggagcccaattccttcacttaatagatgaggaaagtgggacctagagggaaagtgacttttccaagtttacccagcaagttaggaagagttgagactagaactcgaagctcttagtttagggctttttccacagagatgaaattcttagcccttgtctcccttcctgtccttttcttcttgttctctatctctactcctcttttctttcatccaaatgctcttttccctctcctctgcccaacttttcctcctccattgctatccctggaatgtgtgttctgtgttccatctttactcaggtcccctcttttgtaggaaagactgaggccagattagcaagggctctgttcccagagtgtggagtgagcttgacttcccttcctttctttctccttttctttctttcttttcccaccccctctggcctcttcaaggctgtagaacagcagttctcaaccttagttccttatttactaacaataaatagttcaagtatcaagatttaagaatggtttacttctaaggctaggcacagtggcttatgcctgtaatcccagcactttgggaggccaaggcgggagttcaaaactagcctggtcaatatggtgagacccagtctctacaacaaataaaaaattacccaggtgcagtcgcgcacgcttgtagtcctggctactggggaggctgagatgggaggatcacttgaaccaggaaggttgatgctacagttccaactatgattgcaccactgtactccagcctgggcaacagagtgaggccctgtctcaaaaaaagagaatagtttacttctggagtagatttaaaattacccctgtgttagcctcactatatcactttcattctgataggcacttttttttttttggagacggagtctcgctctgttgcccaggctgaagtgcagtggtgtgatcttggctcactgcaacctcccacttcctgggttcaagcaattctcctgtctcagccacccgaatagctgggactacagacgcctgctaccatgcccagctaatttttatatttttagtagagacggggtttcaccatgttggccaggctggtctcgaactcctgacctcaggtgatccacctgccttgggcctcccaaagtgctgggattacaggcatgagccaccacaccctgccaactaatacacatccctggggttgagtaactgcactcaaccccagggatgcccgtgagaatgtggaatgttgtcatgtttgttttgggaatggttgtagctaaagaaggtgggaagctctgactgagagttcttggggtatacactgagcagtaagcttccctctttttacttcttttcagggcgtccccctggataccagtaaactgtccactgaccagcggttacccccatacccatacagctccccaagtctggttctgcctacccagccccacaccccaaagtctctacagcagccagggctgccctctcagtcttgttcagtgcagtcctcaggtgggcagcccccaggcaggcagtctcattatgggacaccgtacccacctgggcccagtgggcatgggcaacagtcttaccaccggccaatgagtgacttcaacctggggaatgtgagtactcaggctccttgctcaaaagcaggggagtgggtgagggtgggtcaatggggcctgaatggcatggctggtgcactgtgaatggggagatctaggtggggtgggtggtggggagatctcctctccccggaggtaacatagcactgccagcttggggctcctctcttcctgcgtttgaccctactcctgcccctctatttctgctcagcttgctctttgatgacttctgccttgacccgttctcttcctggcatgcacatgctctggcccagcaggtacggtgcccatacttacttcgggccccgtgctcgcttctgtcgctctgcttgctgccacctccctctgtcattgcctctgttcctggggtggatgaaggttgctgggcaaaggggatatgttagcagggctaggcaggacaccagttctaaatcctacttcctaaagatttgtctgtatgtctatagctggagcagttcagcatggagagcccatcagccagcctggtgctggatccccctggcttttctgaagggcctggatttttagggggtgaggggccaatgggtggcccccaggatccccacaccttcaaccaccagaacttgacccactgttcccgccatggctcagggcctaacatcatcctcacaggtgaatgggggtgggtggtgatgggaaatggaaggaggaagtgacacattcactaatgagtaggagattgaggggtcttggaaaagtttacaggacatggggtcctcacctgtctcttctacccacaggggactcctctccaggtttctctaaggagattgcagcagccctggccggagtgcctggctttgaggtgtcagcagctggattggagctagggcttgggctagaagatgagctgcgcatggagccactgggcctggaagggctaaacatgctgagtgacccctgtgccctgctgcctgatcctgctgtggaggagtcattccgcagtgaccggctccaatgagggcacctcatcaccatccctcttcttggccccatcccccaccaccattcctttcctcccttccccctggcaggtagagactctactctctgtccccagatcctctttctagcatgaatgaaggatgccaagaatgagaaaaagcaaggggtttgtccaggtggcccctgaattctgcgcaagggatgggcctgggggaactcaagggagggcctaaagcacttgtaactttgaaccgtctgtctggaggtcagagcctgttggaaagcaggggtagaggggagccctggaagcagggcttttccggatgcctaggggtgggcagtgccagcccctcctcaccactcttccccttgcagtggaggagagagccagagtggatactattttttattaaatatattattatatgttaataaaaaaatcatatcaaa

SEQ ID NO: 2856 - DNA, 8098 bp, Homo sapiens
tttgagtttttctggccctgtcagctgctgtggcatgacagatttatacagcatttgcaaaaaaccagcggctgctttttctttaacaatttttcttaaaaactccagttcctattctccagcttctttgtccagtctcctcccctctcctagccaccccccagactctccagatttggggctggtgtcatcaatccaatttattaagtcctcaatgagggggaggaagggccacatctccctctgcaggccctttgaccatcttgatggcttctgctcctccctgtcccctcagctctgccttggtttccccactgacaaaggggatcttctgctgtcctgtgtgccctgaaactaaaacccagggggaggccagaaatcctcagaagttttccagctccctgcaagaatagccaaggacagagaaatcacaggatcaggacgagcagggcaagctggagcagggggtagaacagaccaagtcctttaccgcagaggaagaaaccacactgtggaagggaaataaatagaggggtccagggcagcagagcccaggcccccagggcgcagtggctataggcgcagcaggcgagtgggagcccccggccgcttcagccactgaggaagagacgcttgtaggccttgttcatctgctccaagaagatgaaggtgaggacggtgtgggggcccaggcgggcatagtacggcgtgaagcccttccacaggctgaagaagccctcgtagcggacaactttgaacagcacgtcctagacacagacaggcagggcgctggggctaggactctaggtccccatccccctcacccagctgccttcacacctttcccaggggatccgacaccccctcccaggcccccagaatggcttcctcaccagcccgttcttgtattccggcttcccatcaatcatccgcatgttctggattctgcaggagaggacgcaggggcatgagagaccgaaagggcaccctcccacccacctccaggcccaggctgcacactcaccgggtcttggcaatgtccacaggcatggaggcagcagtggtgacaagaccgctgatcatgctggcacagaagtggcacaagatgttgtcagagaagtagcctgggggaggtgaggcgggggtggcagtcagctcagaggtggctcaggccaggctgggaactaagggcccagctctggatctcacctgagtccagtaagaactgcttggattgggagtaggaggcgagctgggcagcattgacgacgacggcccgagccatggtagggatgcagccctggagggaggggagcggggaagagtcagaaacccctaaaaccagacctcacagcccccaagtctccagcccctccactcacccgccacagtgtgaggacaccctcttcccgggtgattcgaatcagggcgttaaacacatttttgtagccacggcgctggtcagctggaagcctggtgggaaggcagaaagaggtcaagatcaggattgcccacaggtgcaaagaaaggaaggccagaacaggtaaacactctgctccagatccgggataaaaaactggtcctttcattctagattcgagggaatggggctggggttaggttcagacttggaactcaccggccatcggcagtcatgcggataagagccacttcggctggtgttcccacaaaggcaccagtggcacctgcggtcatgccaatcacagccttcagcagaaagccagggggagtaccatcagccccagtcaggcgctcaaacagcacggtatagatgccaaggcgggtagtggtgtaggtggcctgacgcagcaggccagccgacagcctgaggagcagaggggtcagcatatcaggccaaggtctagagctgccaacccacagtctaccctccatcctgaggccccaatacccagtgtaaatgcccctcaggccttctgccttcaggatactggtgagggcatggaagctggttttgtactctcgagtcttggccccttccccgctcaactgcatccggttcttcaccaggtccaggggctggacaaaaactgtagctcccatcctgggggaagacagaggtggagtgaagggccaggcattccagatctaccagtgcccactggagcctggcagcaagaggttacaaaggtcagggcctgccatgcgattcaagaatcaggatgctggtgagcatgtgtataagagtctatatgtacaccaagtgcaacgggtctgaaaagtctagttgtccagtaggggccatgcaatgaaagtgctccaagcagcttcatgacagtcaagcagtgacctggggctgcacgcagtccgacacagggaggggaggaaggggcatccaagatttaggactccaggtagtcctgcaggagccatttaatggcctggaaccccctgccgcccggccgagcttagcaatgcgctgggaaactcagctggcccggcgggggttgtgcaacgaccctgcatgcagtccataagggtcctgcaatggggccctagcagcccatcggggaactcgcaatacgctggagatcgcgctgaccccgtgccggcacagttcactgcaacagacccagagatgaaccgggcccggttccttttgcccttcccttcctcctcttttcccatccctggggcctgagcttacccggccaggcccccaaacaggaacttgacggacttaggggaggtacggggcttcccgtctatcccgccggccccggcactcgccgtcgccgccatcgccactcaatggccctcggctccgggtcccgtgcgcgcgcggccccgctcgcgcccaaggtgacaccgcgcgcgcaacagagcgagggcgcgcgcacgcccctccagctctcaggtccgacacccgctggaagccggcgcgggcgcaggcgcgcagcgcaaaggcggccgggagtaaggcggagctgaaggaggagcttgatggaagcgtgcgagaaggggcgtaactgatttggaaaccagaggaaaggcgctgttttcaccgaattagaatcgcgggaaaatagagaagagtttgtttgaaggtctcgcgagatcgagtgagtacggctcgccaagttggagcgctctcgcgatagacacagcaactattcagctgcgaggggacgggagaggtggtgagcactctcgcgagatttgaaggagcggcggaggccagagggaggagaggtttgtaaactaggaggctccgggtttccgggcacttttattaggtcgtcttctgggccaccagtgccccttccatctccacaggcagtccctccatcgctaacctttttttaaccggccttttaggaccggaagtccttcatctcaagcatccaatgctgaaagcggcctgattttctctaccggaagcccttttccagaggctgggaacacggcccacctagcaggaagtcccacctccttgagctccgccacccttcccgaagtttttctgtcacctgtgttaggctccgtcccctttccgcgttttatccccgtaccagaaaaggatacatttagtgcctcccacccagctccactaaacgggttggatatctcattctttgagttggtgttccttccccggcgcccccatgtagctgggaagtgggacctgggggtggttggacccctgggatcctaaaggaggggcagggagggcgcagaactccgcttctgctccttgctaccaggacgcgcggcctcctcagcctctttcctcccgctgccatgcaccctgcagccttcccgcttcctgtggttgtggccgctgtgctgtggggagcggccccgacccgggggctcattcgagcggtgagtctgagggacggatggggaaagggcgctgaaaggaagggttgcaggctgaaggggaacatcgccttttttgtccgcagacctcggaccacaatgccagcatggactttgcagaccttccagctctgtttggggctaccttgagccaggagggcctccaggtgattttctttcttttcttttcctccttccctcccttccttccttttctgtcttttttctttttttagtatttcgcaagatcctccatcctaggctggggttggggaggtttgtcctgggtgaaactggaggtaggaaaatgaagttaggaactgagcacgtctagtgtagaacccagaatctagagggagaagacagagtgtccacccctggaactccgaggttatcagggagactgaaagtggacgaagacagaaggcaggatcaacggtccttatcaggaaggtctcaggtgctagttattgcttatatgactttgggcaagttaatctctctgagccttagtttgttttactgtaaaatgggatattagaagttttcctagggttattgtgaagatcaaagtagatacgcaattttggtagtatttcatcccaaagactgccacatagcaagaactcagttgggccttagtagcagtcgagttgtttgtgagatgggtaattagaaaattgaagaggccgggcgcggtggctcacatctgtaatcccagttcaagaccagcctggccaacatggagaaaccctatctctactaaaatggcaaaaattagctgggcgtgatggtgcacgcatgtagtcccaactacttgggaggctgaggcaggagaatcacttgaaaccggaaggtggaggttgcagtgagccgagatcgcgccactgcactccagcctgggtgacaaaacgagactccatctcaaaaaaaagaaaaacaaaaagaaaactgaagggaggggagtgtgtctgtatgagtatgtgctggagaggggactgtgaaacagaacttgagagaaagtgacatgggtggtttgagaattgaattacaattggaatattagaaggcaaaaataattgcattagcttgcagtatagggtacagattagcccatctgggacagcgagagggatgatgggagagtttggtgaagggatgttttatgtcattgccttttcaagaggctaagagaaggttgtgatggtgggatgctcactcagaccccaggaaggaggaggaagtgaggatagaggatgtgcagcatgtgggctggtgtgtttggtggcccctgtagagagcagaatctagaaaggagaaatctcactgttgtttgcttccatccttcaggggttccttgtggaggctcacccagacaatgcctgcagccccattgccccaccacccccagccccggtcaatgggtcagtctttattgcgctgcttcgaagattcgactgcaactttgacctcaaggttgctgaatgaggaaggggagctgggcagctgagggtaaaaaaaaggcaccaggaatgaagacaggtaaggcccatgatggctccttgtcctctgccttgtctccctaggtcctaaatgcccagaaggctggatatggtgccgctgtagtacacaatgtgaattccaatgaacttctgaacatggtgtggaatagtggtaaggctgggggaatctatacagctgggctttcagtaggacccagagatggtgggaaggctgaaggcctcaggaaaagaagccaatcctttaggtggggtggggccaaagtgcaagatgccagggttcccagaggatttgagtagaaggttgtgagtccccagagtaacaccttgatccctgcagaggaaatccagcagcagatctggatcccgtctgtatttattggggagagaagctccgagtacctgcgtgccctctttgtctacgagaaggggtaggacatgtgcctccttcccattcttccttcagcaagcagttccatgccaacctggagcccaggcctcctcattacccgaaccattcagcctcctgtccttccttccctgcctctttgactttcttcccattcctgtccccacctatgggctttgtccagagccagttactttgtccctctttttttctccctttgcctttctcgccctgctgagactggtcatccttttcccagggctcgggtgcttctggttccagacaataccttccccttgggctattacctcatccctttcacagggattgtgggactgctggttttggccatgggagcagtaatggtgagtagctgagggaacatgatgggaagcactgaggcctgtgaggccagactggatctggagttgggagatgggagtggcttgtcctagattgtctagttttgttcctaagccttgtccatccacccccgcttcccccagatagctcgttgtatccagcaccggaaacggctccagcggaatcgacttaccaaagagcaactgaaacagattcctacacatgactatcagaagggtgagggggttaggggagaagagggcttttcccacagtttacctggttctgaaggactttgagcccagaagatagggtatacaaagatggcagtggccgggcacagtggctcacgtaatcccaagtgcctctaatcccagtactttgggaggccaaggtgggcaggtcacttgagcccaggagtttgagaccagcctgggtgacatgataaaacagaaaagtcccagcactttaggaggctgaggcaagtggatcccttgaccccgggagttcaggccagcctgggcaatgtggtgagaccccatctctataaaaaaataaaattagctgggcatggtggtgtgcacttgtagtcccagctaattgggagactgagacaggagaatcacttgaaccaggaaggcggaggttgtcgggggctgagattgcaccactgtgctccagcctgggcgacagagggagtccctttctcaaaaaaataataataaaaataaagatggcagtaggaaggtttcagcttgagatgctgtcttttcttctgtttttatgcataaatacaacgaagacgggagaggagatggaaagcaaagatgattaagtgaaataattgtgggaaacaatagagggatagactttgcttataggggatgtggacagagcagaaaaatgggaggaatggggaggattcagttagagaaggaagaaaccggtaccaaggggctggggctttaggccctggggcctccagtgcccgtataaggctgtggcagaagccctgcccatttccgttccttccactccctatctccaccctcacacctccccaaaaacccacttcccttcttacctctgcttctctttgcttgtcccttctagccctaaattcttccatgttctgccctgaccttatcctgcctacctgtcttatctcttccactggctttgtaggtgaggggaaatttttgcaaggctttaaaagccttagccctgggtcattgtggctcagtgaaggactagattattttctttctgtcccaggagaccagtatgatgtctgtgccatttgcctggatgaatatgaggatggggacaagctgcgggtactcccctgtgctcatggtgaggccctcactgcctgcccatgcccctctgccaccagcagccaccaggtgcttcaccttgttcctctctgcagcctaccacagccgctgcgtggacccctggctcactcagacccggaagacctgccccatttgcaagcagcctgttcatcggggtcctggggacgaagaccaagaggaagaaactcaagggcaagaggagggtgatgaaggggagccaagggaccaccctgcctcagaaaggaccccacttttgggttctagccccactcttcccacctcctttggttccttagccccagctccccttgtttttcctgggccttcaacagatcccccactgtcccctccctcttcccctgttatcctggtctaataaccccccacacatacacctctggtgacctatttgcacagaccgtcgtcttccctccagtcttctgagggataggggacattccatcccaagcttctcccttacccacacctatccttttgaggggctttggggtggagctggggcaagcagagggactgggtcttcacttcttgggctaataaaattgtttctttgtggactaaggaag

SEQ ID NO: 2857 - DNA, 327 bp, Homo sapiens
ttgccttcctggagtttaatgacaactgctgggacctacctggcagcagcctgcagtactaggggcaaaggtgggtgcctgctttgcacctgcagcctcagaagtgcagctctcctcactgcccaggtcagcaggacagcaaggggtggaccctgcagcatgcaccatcttggtgtgactgaatagtcttgggtttcctgctctcaggctgggacacaggcaaatggaaccccatttcttttctcataaatcctgccattctctaaacacactggtgtggcttcctctcctgccttgtctccagcccaatccaaggcttggggccca

SEQ ID NO: 2858 - DNA, 3387 bp, Homo sapiens
caccttgttagtagaatcttttttattcagaaaaaaaaaaccccaaaaaacaaaagttttccaaccacacacgggagggatatgggtagggggaggtgtctgtccatccagccctggcccccagcccatgtggttttggcagcaataaggggtatggggtaatggcccaaaaaataaaatggtttgtgtgtgtatggggaggaaaggggtgcaaagctgtggggagcggtgaaggggaagggacagacgaggtcagtactgggaacgccgaaggtgggaggccatttcataacatttcttgttgatcaaaccaccgtggacaccttctttgcccatcagcaggactagcgctggaggaggaggaaagagaaaggaggctaggatccaggtgtcacaattccaccccctgccagctgttcagcagctgtccagccctgggggctgtaacccaacctcatctctcccaacccgcccccccaccacacacaggcaggctgtcagtcaccctgaaacaataaggcttttcaaaagaggaaaatcaagcttaaacgctggagaggaacagactaaaaacttaggggtcaaaggctcatagactgttgattcatgtgttcaggctagaaagggctgtggatgtgcatgccacctccaggttctaacaaaagaactcaaacgatgaactcgatgattcaagaccccaacaatctacctatactcctagaaaacagtttctaatccgagctcaaggcagtaagtaatttaagaggtaatgcagttcagcaacttcgaattacaagatgaggaactgagacagaatggagggactatcccgtgttccagcatccagcagacaaggaacacaatactggtctgactcccttcatgttggggaatcacacaaaaaagcaccctcaagattaccagaaggcggtacattagagatcttggagctaaaggaagggtaagactcaggaactcactcttgtcagtcttggtgacagtgacattgaaggtgggggccccaccggtgctcttggtacgaagatccatgctaaattccccatcctgcagcagtgagtcccggatcaccgaacatttctggcccccaagtgtcagcccattcacgtaaaaacttgaccggtctttgccaaccaggacacccacctcagctggctggaagaggaaccaagcgcccatcaagttagtcagtgcaccaagattcccaccgtgttctccaaagacccacctgtcttccacttctgagaaccaccccgccgtgggggctaagtataaattatatactcagtacacatcaatgaactgtgagaaactctgaggactgtgggacgttagtgcagaaaaagatcatgattctgaaacttagaatatggaaccagggaggaagggatgacatactcctctagagatttagatgtcagtgttaatggggaaagtaaacccaggaaataaagggagtcagtgaggtaagtgaggagcctttggatgctcagaactctccttcaggaaaagcagaagcggagaggggaagggaggggggcgggcgaggcaagagaagcaactttgcccttatttggtcaaaggttctgcaggagctgttagggcccggacgcctgggtctccaagtaacctagagtttagctccaggtatctctgctctgagatgaggaagcagacccctgggggctttccgggaaagttggaaaacttttgaaggtggacaggggccagacccggcaggccagctctcgggtctaggtaccccgggaacctttcccccctccccctttcaccccaagcccccacatccggtcccctcccgcccggaaacccccttccccccccttttgaacttccgctccccctccccacttccgggcagtgtggacagggagatggtggtgggagcagcggtagtaaaccaatatactttcgcttatgctgtctcagaacttctcacaaagttcccctgctccaggccccgccggatggcgggaagggagggcgaggggacttccgggattggcctcgcaggaatgttgaatccaacgtgctgagctgggggggcgtgtggtggcctcgccctctctaacggagttaggaggggccagaagcccacagagggtgggcaagggaccaagaccacgcgcctggggctcccttccgcaccaggagaaacaatggtagagggacgcgggctggcagccggacggggagctgggggtccaaggatccccgggtcccctctcaatcccaatccccagtaaaaactgaggcgcgtccccgccccgccctgggagaggcggaagtgggccgccgcaccgggcgccgcgcccctccccgccctgtgccccggatgtaacgccccgtcgcggaaagcggggtagcgggcgggatgggcgccgccgcctggggcataggacctacgggcaactgagggacccactcacgtgcagccgccattcgcgccgcttccagggcaagcacccagtcagggcctctcgctgcgcgccctagaccgcgcccgcccccacccaagtccctccctcagggtccaaaccggagcagtgccccggaccgcgcaggcctcgcagtaccgtgatgttgacgaacgttttcccggggacggcggcccagacggagggcgagtccttgtagcccacgatggccgcgtcctgacaggtcccgtccgccatgaggttgtcgatgtaggcgttccacccggccatggcgctgctactggggctgctctcggcgctgctgctggggccgcggactgggctcgagctgcctcggctggcgggcggggggaggcggagagctcggggcacgcgctgccgtccggaccgcggctccgctcgctgtgcagcagccctcgcaccgccacttcctgctcctccccccccccgccccgctagatttttatttgcaaaggacggtaggggcggggcctactccccattccctccctcccccactcgccagcccagacaccgaactttgcaaatgcaattttaaaaatccctccccctattgcaaaatttgcagagttcgatggaaagcaatgcagaaggatggggggtggcgggagagaggtgaagggtagggtttgctccaatttgcactgaatataaaccagactttggtatcggggcagggagtgagccagaagaaggaaggaaggagaaagcaggaggaattagcaagctgcaaatttagcaaattaaggagagttcggggagcccagggttaaacgggatgactcctccttcccccacctccgccgaagggaaggaccggcgggcggcggcgcgtgtgcccgcgcctgcgcctgcgccggggccgggagtgcatggggcggtcggggcc

SEQ ID NO: 2859 - DNA, 11470 bp, Homo sapiens
gagactgcagagggagataaagagagagggcaaagaggcagcaagagatttgtcctggggatccagaaacccatgataccctactgaacaccgaatcccctggaagcccacagagacagagacagcaagagaagcagagataaatacactcacgccaggagctcgctcgctctctctctctctctctcactcctccctccctctctctctgcctgtcctagtcctctagtcctcaaattcccagtcccctgcaccccttcctgggacactatgttgttctccgccctcctgctggaggtgatttggatcctggctgcagatgggggtaggtacaactaaatgtctgtgtgtggatttgtgctgatgttcacatgtcgccaggtgtgcttaatggggggaggagaggtgtgaaaggaagcctagaggctggaataataggctcagagatgaggaaaaaagagtggggtgtggaggagaccacttcccttctttaccttttgtctctccagccttgttgttattggaggtcggggagaactagcggcaggcaggcagagtgtgtacacatgcaagtgctggaatctctttgcaggctacagattttctccagagctctttcccccactgccctggtcccaggcaggactcctggacttctttatttacaaactcctccaaatagggagtcaaagaggcctggagtaaaaagatggatagatgggggtagggggaagaatacttcctgcccaactcagaccctgatctccaattcatccccttttggccaagattccctcttcattctgtggagcgactaactccccagttatcctctgaaagtggcagtaagagtcaacatttgtttgacattttacagtttacaaaggactttcaggagctcccaggagatgaggagggattcttgggagaacaggctgaagcgctccaggagtgtccccaggaactcctagacctcatttttgtgtttcctgtgcctagcacagtgtccagcacatactaggtgtgtaactgaggtttgtggaaagagcagggtgaggtgggtgtccagagagcagaaggcaaatgcagagaggatgggggcaggcaggcagccaaatggagagtcacaaatctcatctgaggagaaagaaaaaaagagggaaagaggaggaagagacagaataagtgtgttgaggctctgaccagagtggacaggcacctttacagaccagggagtttgagttgttggggggtcccacagatatggtaaaatgagaggctgcctccagctctcccttgggctagcagaataggtcaaggataagagcaggacatctcacaagtttgaggaatttaagggaataagagacagagagaggaaggaatttaggatttttctccagagtttctagtagtatgaatattgcagcataaaccatgaaggccttcgttttcttcttgaggcagtttggccgtagggaggggctggacctgcagaccctcagcctttgcgtcagacaggactgcacgagagcctggcatgtgacccagctggcagctctcttctctacacacaatgcttcactttcatcctgtccctgccagcctggctgcctgtgcccacccaccaccctcaatctagagtagaccctgccctgactcccacccttccctaaccatctcagaatgtagggagcagagcctcctggtgatgaggagtttcctctagagctaatgggaccagaaaagaagaatttacatatgagtttacagctcagtggctttattcatgcaattttttaaagcaaaggaataatctccccttctcccctcagtagcaccccccaacacacacacactctaaactcctttctcctccccgctttctagtccctatccttccaaccctctgcccacaccctcaccccacccaccccaatcttctaagtgttagattgacttggcacaggttacagaaaagaaagggttgggccaatcgcacatttggatccaggttaattttagtctctgggctttacctcttttccttcctcctccccttttactcggcaggcaccaacacagcctggctggtgattttaaataggccccccgacctttccacagaggtgtccggtttcagggcttcctttgcaaagtgctggagcagagggaggagagactgcagagagggaggtggagcagtacagaatgccagagggaggggagtgtggaggccagggttctgccccaggctgcgctggctgtaacccaaactattctgccttgcaggtcaacactggacgtatgagggtgagcagatctcaaggcctcccgacaaccctttcacactgggacctcctcacctggcaggaagacacactgtgcgggtgggaggagacttcctttaccttctcaccctagctcctcccttctggatctcctcctgccttgagtttcacatatatggctcctagatcctgctctaatcatcaaatcctacacctcctgatttggcagaaaagctagttaagtcctcagtaaatcgtgtaggagtgagggagctggggtggaaaggaagctgggtgggaactctgagcttagctgccaggtctccttctggctccgtctatcctaatccatcctacccctaacctgcatctgaaattgggacagagctggaggtcaggggtgaggaagaggctggcaggatagtttctgaccctgggggaggtggaactcagttcctatgaactactgattaatgacttaaccaaactcaagttcatgataaacggtcagtgtgagagcaagaagtgaatgatgagaagtcaggatatctgaatcccaaggccacttgataggggcctccaggagaccgtatctctctaggatttttttttttttttttttttttttttttgacacagagtcttgctctgtcacccaggctggagtgcagtggcgcaatctgggctcactgcaaactccacctcctgggtttaagtgattctcctgcctcagcttctcgagtagctgggattacaggtgcccaccaccacgtctggctaatttttgcatttttagtagagatggggtttcaccatgttggccaggctggtctcgaactcctgacctcaagcgatccacctgcctcggcctcccaaagtgctgggattacaggcatgagccactgtgcctggcctatctaggatcattttatttctcccatttttctactcctactctctaatcccatctctcagggtattcaggttttctatgcatcccctctgccctcattcagctttcttgtcctcaaaatacaggtaagtaaaagagctaccactccccattcatcaggatagttggggaatcatcactgcctctgggtagggaaggggaactgcagcatgagactcaacaggactcctacctcacccatccctatacaactggggtcttaacctgggtggagggaagtccatttctacctccacacagatgtatggcttggttaggggaagggtcaaagggagggggtgctgttgaagggtagctagagctggaggacaggaccaatgtctttggtaacccccaccaggcccacatggtcaggaccattggccagcctcttaccctgagtgtggaaacaatgcccagtcgcccatcgatattcagacagacagtgtgacatttgaccctgatttgcctgctctgcagccccacggatatgaccagcctggcaccgagcctttggacctgcacaacaatggccacacaggtaaaagcacaggctccaaggagttgtaggctccagctcagatcttaggagtcagatccttttgtagttcatgggcatgatgatggggtgttcctgagcatgcgtaagatgtgccgccctcaaatcttgtcaagatgttggcacattacccatctgacataaataaacaaacaaataacctcaggagtcagaggaaagcagcattttcctaacctacgaattctcaaaaacctttgtccatgaatttggagatatgagaatggggatcaggatcctgtagccaaagcgggaatcgaaatgtttataaccaagctcagtaggtaggtatcattgcactgacttggtcttcaccaagaaaaaggaagatatgctagaaaagcactggcctatgggaggaactgggtgctactgggggagaaaactggaagagggccaagtctcccaagaagtggtggcaacccaggagtgggaatgtatccacatgcctccaccaatccgagtttgctcttttcctcacagtgcaactctctctgccctctaccctgtatctgggtggacttccccgaaaatatgtagctgcccagctccacctgcactggggtcagaaaggatccccaggggggtcagaacaccagatcaacagtgaagccacatttgcagaggtaccagggaacaaagagctgggactcagacaaagtaacagggatgggtggtcctggggaaaggatctggaccttaggaaaagtcatgctggggggataaggccaatctctgagggacagacttagtgcctgccggggacagcggggggatggtggcagctaggatcaaggccttgaagggggtgcagacattccatgattcaattccctcttccttcctttagctccacattgtacattatgactctgattcctatgacagcttgagtgaggctgctgagaggcctcagggcctggctgtcctgggcatcctaattgaggtcagtagcccccagtcccttccaggtttctctccacttcctctgcaaccctcaaacctatttctgttgctggcctccttcctatggcaggcagcagcccaccctgaccatttattctgtacataaatttcttattccaaacatggactcattccaaactctctccctttccttctcttccaggtgggtgagactaagaatatagcttatgaacacattctgagtcacttgcatgaagtcaggcataaaggtgagccttaaaaatctatagcaggaagtaagattagactttcaaaaactatccttaaaagccttgggatgaagcaattacatagagccaaggaattttgcttctgggagccctatctaggtaagctagggcacactgaaaggaagatgagtcccagtctgttctccccagatcagaagacctcagtgcctcccttcaacctaagagagctgctccccaaacagctggggcagtacttccgctacaatggctcgctcacaactcccccttgctaccagagtgtgctctggacagttttttatagaaggtcccagatttcaatggaacaggtaagtggtggagaaacgaggtgaggtgagacacagttgtaacttcagaccccttcccactccccaaagtaacacctctcccacgcttctgctcctcagctggaaaagcttcaggggacattgttctccacagaagaggagccctctaagcttctggtacagaactaccgagcccttcagcctctcaatcagcgcatggtctttgcttctttcatccaaggtgattctgcacggctcagaagagatgggaaactgagggggacacaatggcaggaactagggagccaatgggaagaaaaggctaaaaggggagggggtttctgggacttgcttggactgggaaccaacccccaccccagggtgcccccgggggattctcccaggcacagcagcagagagtgctgctcccagctgggatggggatctgaagtcccactgacccattttcttctcttacagcaggatcctcgtataccacaggtaagccagccttataagataatgcggggaggggaggtgtcctcaccgagtgggggaaaggctcaaaatctatgttagtcctaggctgacaccttttacctttatctcccccaggtgaaatgctgagtctaggtgtaggaatcttggttggctgtctctgccttctcctggctgtttatttcattgctagaaagattcggtgaggccctactttccattcctccagtcccttcttcttttttttttttttttttggtaggtgggagacggagtcttgctctgttactcagtctggagtgcagtggtgtgcaatctcagctcactgcaacctctgccttctgggttcaagcaattctcctgcctcagcctcccgagtagctgggactacaggcacgcaccatcacacccagctaatttttgtacttttagtagagacaaggtttcaccatattggccaggctggtctcaaactcctgacctcaggcaattcgcctgcctcagcctcccaaagtactgggattataggcatgagccacccgctttttgagacaggttctcactgttgtcgaggctggagtgcatggctttatcacagctcactgcaacctccacctcccgggctcaagtggtcctcccacctcagcctcctgagtaggtgggactacaggcatgtgccaccatgcccagataatttttgtatttttagcagagacgggttttcactacattgcccaggctggtctccaactcctgacctcaagtgatccgcccgcctcagcctcccaaagtgctgggattataggtgtgaaacaccttgcccagccctcttttctgttaaaaagcattctcctatttcacctctaatctgcttcacttagatagcagtcattctcatgagccattcccctttccaggaagaagaggctggaaaaccgaaagagtgtggtcttcacctcagcacaagccacgactgaggcataaattccttctcagataccatggatgtggatgacttcccttcatgcctatcaggaagcctctaaaatggggtgtaggatctggccagaaacactgtaggagtagtaagcagatgtcctccttcccctggacatctcctagagaggaatggacccaggctgtcattccaggaagaactgcagagccttcagcctctccaaacatgtaggaggaaatgaggaaatcgctgtgttgttaatgcagagaacaaactctgtttagttgcaggggaagtttgggatataccccaaagtcctctaccccctcacttttatggccctttccctagatatactgcgggatctctccttaggataaagagttgctgttgaagttgtatatttttgatcaatatatttggaaattaaagtttctgactttaattctggcctatcctttgaggctcttgagggtgggcaagttcctgaatccctcaggtggtaaagatgggcaaaggatggggaaaagaagcatgggtgattaactccttttatcccacccctggaaggaaagataagcttctgggaagacacttaacccaaagtttcagacatgttaaaccactagcccagatttctgcccttgcaccaaggctatgcttggaaatcagtggttgccaggttaggaaagtggctggatgagagatctgaggacagaaatctcaattaacatgctatcccctcccttaaaagccaagttcccccacaattacaaattcttttttattagtcaaaatcacaatcaccttgattaaaaggatgggacactccaccctcagcagaaaatgatacagtttatagaaaacctccccgcccctcccacaccccaattaaaaactacaaaaaaatctcccctccttccctacgatgtcatggtagtctgactcctccagtggcactgcagctctggagtggccagctcaccacagcaccctccacttcaccttggggagaggagggatgctggtggttaaggaggttaaaaccattagttccagtaatgccagttcccaaacatgcacttccttcctttcccccaaggtctgggaccaaggagaaagggaccgaaatgagcccagccatgaggagcaactcgaggagagaaaatatagcccaaggaggttagaagagttccaatatacctcctccctccccccacctcaaaaaagaaaaaaaggcagtttagggtatttatcacaccaaaaatggttccccctcaggcctgagaaaaagaccaagatgtccagtcttgagggagtactgagaaactcagagctcatctatccttgagcctccattaatttcatctccagggcaatggctaaactaggtcccttttcttggcaacctgcactgtccagaactggagatggagaaatacagggcgaggacatcaggagggcaccccaggcccaggggtcccccctaggttccctcagtcctcgggtgggatgcgcagggcagaatacaccatcacccgactgtcctcctgccgtcggcctgcagaggggaagggaggtgagtcttgggcagggtgagagcagagcactgacacagggggagtcctggacacaacaagggggtccccaggtggtggggataagtgcagattcaaacccaccagtcactgactggctgaacccaggctgctcctggtaaagcttagagactaacggtcacaaaaggacaaagcaaaaccctggaggtagtggggtagaccgacgagaaggagacagagaatgtgggcaatggacccgggctggggctgggctcagtcatgggcagtggacaggcaggtgggatctgtcaggcgatcagtccaggtagtcagtccttacacaagaggctgcgctgaatacttcggagggaccctccagctgtgatgaaggcccagagccccatggaaacagtgactgcatagatgggcagcaggctggcctcataccaggggttcaggaatgtctaggaaggagggtaagagtaggaaagagattagattctccctcgacctaatccccatattctctctgtacctttctgactcccagatatctctctcaaattctccagtctttcccttcagagcaccaacatcttgtggttaaggggacttttgattttcagctcctcagaaactcaaaggtttctgccgctcctgctcacctcaggccctctgcattacagtttgactaatcctttcaacctcctccccagagcaggtgatagaaatgatgctgaggtgagagaccttgaaagactcacctttcctcctcctcccaggtaagttaaaaatgttaagaagtgaggataccctttcccccacatcccactcaccattaaatgcttttctccctaactcaggcccctgtctccaactcaccagtcccgatgtcagtaggtgactcccaaccaccaggcccaaagcccagtaccgtctcctctcacaggcatcaaagaacacaactccccaaaaggtatggagcaggataatggctgctgtcagaaaggctgcagggagggagatggggaggagatacatccctgatcttctcccaggctcctgagatgttgagccaaagaagtctctcagggaaggccaataaatcagatcagggacaaggatggatggggggtaaaggctagatagaaggtggatcttacctgaagtcaggaagtaatagggtgagtctccatggatcccaaccacacctggcccaagtgcatcagccaaaatattgataacagagaagacaccactgatgataccgaaggagagaccagaaactgggggaagggaggatctcatcaatgtcagagatcacactattgcctgttcaccactgacccctccccattcccggttacaattctttcacatctactctccctccagaccaactttctttggaagtgacggatgaaggaaagtaagaagccacttagaacatgtggatatttagagacttccctagaggagggggctgtccaactccctcctccagtccctctcccttggctcaccataggccatctggcggatggagatgggtgatcttccgtcctcactcagcgatgctaacccctcatctgccttcctggggtggggtggggtaggggaaacatgagggagggcagggatgctcctttccctctaatgtcctcccttagtgcctcctcttccaaaccagcacccaggggctgccccacttcccatagtgcagtcctttgcccctctcccctccagaccactccatcttcttacttaagcagcttgtagtaggcaaagcggaacacctcctgtagaaggacagagacagcagcaccaaaaatcaggaggccgtactggagccgggcatctgaccggtcggtcacatggaccaagatgaaccagaccacagaggccaggagcagggagaccagccagaaaaatgccctgagaaaagacaggggcagtgagacaagcaatagtagtgggagccagagaaatcaaggagggaaaccagccaaagctgcttgaaaagtggaagttagccttccggatggttagggagacatggaccaggtagggtaactgtctccaccaagagactcatctgtagaaaagtgaacgcactggaaaggggagaaatctaattaaagagtcttcagagcgatgacagccagagtgtgcgagcacggaagggcgaggtatccgttcctggatcctcccctaaggcacctgactcggcctgcctaggtcagcacagccccctcacgagtctcggccttgggccttctctgacgtcgctgggaggaatataggaggaatctgtgagatccttggaaggtggaaaccaactgcgggaaaggacaaatctcccagacccaacccctcacctccgcccaaacttcacctccgacttatcgtccccaattcaggctcccaggcttgccccagttcctccagccccttccgcacctctctcttcgacgctctcccgcgtctcccgggccctctactcaccctgcgaccaggatgataacgcgaagcgggtccccagccacagtgatcaagaaaagcgcgaaggccgggccgaacgcgacgaaagtgcagccgaaaaacaccgcagcccccatggctggtcaggtgggaaggggggtgggggcctgaccaggacaggcaaatgggaggggcgcgccagctggggagtccgcgtggggtggcaacgcgaccccacgaggggcgcggtgcaatgtcacccccagaccccggggaaggggaagggggggaaccgaaaccccaaatgaaggtccgcgccacttcctctacggaagccgaagaggggacaaatcccggccgcagccccacggccacctcccatctaatccccacccccggaaggccaatggagaatcagcgcgggcggagctgctcgacctgctgggagttgtagtcgccttccgaggccttgacttcgtcctgggagtggctcgagccggttaatgggggtgggccgggaatggaccagtcgagacaccaattccagggttcggttgcgcttccgtcgctgtttcctttcgtcactttgtggggaaaagtggtagcaatcatacctcttcttgaagggctgcagagggggtagatcctgt

SEQ ID NO: 2860 - DNA, 634 bp, Homo sapiens
gggcaacggagtgaggttctgtctcaaaaaagaaaaagaaagttaagtaggagaggagggtattgtaatctcatttggatggggagaggttagtccttagggaagatgttaggcaaaggaatctgaggatggaaaagaggaaagaaatctggaatattgtttttgaaagcataatcaaagtaccaaaaaaaaaccccacagaaattgtttaaagataaccaaacttcctttccttcctggaagtgatttattatttaatccatatgtgcacactcacatacatgttttacatgtcttccaggatattctggaaaggagctgaggaatagattgtatagatttacacggaggctggtcacagtggctcatgcctgtaatcccagcactttcggaggccaaggcggctggatcacttgaggtcaggagtttgagactagcctggccagtgtggtaaaaccccatctctactaaaaatacaaaaaattagccaggcatggtggtgcgcacctgtagtcccagctactcaggaggctgagccacgagaatagcttgaatctgagaggtggaggttacagtgagctgagatcccaccactgcactccaacctgggcgacagagcaagactctgtctctg

SEQ ID NO: 2861 - DNA, 8559 bp, Homo sapiens
tcttcaatcttaattcattttattctacaaaatgctactcaactgaaagtggaaatgctaacccccctcccccaaaaaaatcgcaagggaaagaagttttaatatgttctttcttccatagcagcaagctttttctaacaagctttctttagtgcaaatactgtaggcttgtattacatatagtaaaacaacaaaacaacaacaacaacaaaaaccaccaccagaaaggcttccaaacaaagctactcctcaattttcaaaactatacaaagattttgagcttgcggttctgcctggaaggtctatttaggagactctccaatgggaccatttcaccattacttaaaaaaaaaaaaaaaaaaaaagtgcccagaaaaggtaattaaattccccatagagccatatgaaccatatacaacttgtttgcctccaaagtcttacagctgactttactccacgtcattaacatatctcaaatacagatgcacaaagcttattttctactatacaccaaaatactatatatatacacatctcccacggcagaaaaaacaccctgataccctactctttacacaaagtcaaatattttcttcctcaaaatcaagtaaacacaaactaaaataaatggaataaacttttaatcatacagagaaaataatttttgagaatcaggacaggatcttccactgtgttctcttacaatgtaaatgtcttggcgaccactgtccccagaggaatgaaaatccacctttaaaaacagaaccttttatacagtttatacagcacaaatcacaaatcactttagaaacaaaaatgtgttatcctaaatttaaaaaaaaaaaaaaaaggaagcgagaagagagagaggaacggagtattttaatgctatcagtttctattcaggcttgatacaacataaagaagatgtaaacatttaaaataaataataaaataaatgtcaatttcttctccccctccctttcccataaccctctcaaaatttgatccagcccctcctgaacatgtcgtcaagcattggataaattaaaccccttggttgatgtatggccaaaacactagaagcataagaagatgccagattcatagtgggatgactgggtttccttttaaaaagctacaggacacaggcacgcctggaaatgtatacacacatgcgcacacacacagcccaacctgtcaataaatagtgagatgctggcttttaatatgaatgccaaaacaactcaacaagcagaaggtagcaaagactccttaagttttttaaagaaaattcacacatcacatattctattggtccccaaattctctaaggacttgggttacccctctgaccatctgaggagtgcacgggagcacatggtggggtagaaggagaagtatggagtgggagaatattgtaggggataagtccttgagaacaaacatcagactgaaggcaatcttaccttggatcttgaagacagaccttctcacctctaagtgtttctgtttatccattacttaggggccttttataaagagatgtcctcatcccttagtctcatcctaacgaggatctatataaaagcgcctaacacagtgcctggcacatcgtaggtgtattcttttccttcctaaagggggcacaaagatgtctgatcaggaaaggaaatcgacctgaaagttaaatggcgagattgcatttgcactgttggtccatcaaggaaaagagaaaaaaagtcccagtgctccagacaattcaaccacacttggaatcaagtgagaggagagggagattcctttccccagagcctgagaaacagaagcagcagccccagatggcttttgactttgagatgcttgtgtgacacacctggcccccaacacaggcagaatgatgtttgactctgaaaacctccccagtgaattatctgcttggagccggctccagcaatttcctaagcctcagccgggatcgcctctccttcctgtgccagcagcttcccccattcaactggccagggagaggactattcgcagaaagactggccaggaggccaagaagacggtgtgttttacacgagctgatcagagcgcccgccctgtgccgtcccagagctgcctgcagcccaatcggagtccacacctccgagctgcctcgcgagtggagccacaagaagcacagaagttcctaagccaaacagaaaggcagccccaatgcagctgttcccatagctggagccatggaggtgtctggtgattctggagcaagggtgtgtgtgtgtatgagagagagaacttggagggcaagccataaggaagtaaaactcaggatatgctcacgacttaggtgtgaatattcagtcttccccaaatcaaatcacctctgactttggggaagctgaacgacctcctatgacaaagcctgggggtcttcacagggcacgtagctcagagtcctcttacagtcctgtgtgttggctggacgtttgccttctgctggtcccaacaccaacacagcttgaaatctgaactgaagccaagttgtgcctcaggaatttgtccagcctggccacaaatcaggctgtgacctgcacggggatctttgctgcacaaagtggggtataagggggcttttagaaataaaagacaagaaagcagcttcatttaagaaatatctatatgcacaaaaaagaaaatagctcccacttggctacaaataccacttgagatgattacccctgtgagagctgagtgcaccccagttttctttgcccatctcctgctactcctggctcattctgctgcttggattcatctcaagccagaaacccaactgcccaatcttcttagaagggtccctcccagagcccctgggaaatcgggagaggggcatcacagccaagggatgcaggaaataacatttttaaagtattttaaacaaaatcctttttctttgaaaccctcctttctgcatcacttgtacaggtcacttccagtcccactggcccatgtactttaagcatacggctgttccactctgtgtgtctagtgcacgaaaacaggtcatgttcatgaaataacatgcgagggaacagctgtgtgaatgtgtcactgctttctccacgggggatcttaattatctttcaaacgaggatactgtgacctctagagctgaatccccagcagcagagtctttgcagagcacaagccccgcagaggctggttctggccaggagctactccctggattcctgtcaaggccctgctggacaagaaactcagcaggagccataccctggggagaaaaggctcagaggggtgggcagcagggaccctgctgagctgtgctcctgctggaggccagggggacccttccccaaccccgtgaaagggggcagctctcctgcagtgggaagcaaaacatcctatctccaattccagcagccagaaagattcaacagacaaccaggaatggcgcatgagccacaagccacagcgacagctcaggccagctgttcacagcttgcttgctgcctgggccagaagagtgcactggggtggggacaggggagtgtaaaagagaaagcacttgatccagcaggtggcagatgaccacagagggcaggaaaggcccggtgccctgcggggaggtgagcagccaggacaggctgagcgggtgctggggcagcagctgctgcagacgccactccagtgacggcctcccgcctccctcccctgcctctccatcctcagcaaatgcttctttgaggcttggggaggggctgcctggcagcatctggggaaggtccaggcccacgctcattaaatctctgtgggtggcgtcaccctgagagccagggtgggggaaaggcggagcccggcagggacttggagtataatgtgtggctcctagggagggacgcctccctggtccggagagaagggtccaggggcagaatggcaaggcagtaattacaggagacgccctactcaagacaccaggtgaagggaagctggctaggacacccgtgtggctttgttggcatgcttcctggcctggtaattaggcgtttggcaaacccaacctgtgccccactgtctcactcacaccctgtcttctggccaagccgttcctccagaagccgtctccgaaggtgggcaggaagggtcctctgagcctcccagtgatggcagcatctccttgagagctcagggagccccgctgggagttctggagatgatgactgggaggcgtcagggtagggaaggctctgtattgcactttgtccccttctggacaagtcagccccagcagaagagccacctgctgccccatctccagaaatgaagagctttaatattcagaccacccagatgaaatgtcatggcaaatttgataaaaaccaagagggagtgaaactgacgctgggggaggaaagggtcaagtcgagggaaggtgaaaccaaaaggcactgagcatgcgtggtggggcagggaaggacaccatcactccagagacagtatggtaacaaagggacaggaatggtccaggccagcttcaggctcttcagaagccagagagatgtccaagtctaccaaaccgagttctccaaggcttttcaagaaatgggatttgcttgcaagatgaatgagggaggaggtcccatggcttctaagagatcaacccaagtcttccaatactcactgctaagtcccacctgggtcccccagagccaggaagctccctggtggcaggtccccctcttgccctcacggccctggagcgcttgaaggtgctggtccctgggaaggaggagcgaggaggaccccctccggagctggggagggaggtgcactgggttacagagccagcagagtgggggagttcaaggagtctgatgattggtccccgctgctactgcttctgcggtgagccttggagcaggattcggagggagatgcgggtgactcctgctccaggacgctaggataggtgaagacgaggttcgaggtgcccggagtgacagcaggtgtggaggtcaccacgatgggggtgtgcaggggctcctcaccgtagaagcccccagcaatgctgatgggcttgatgacagagcgctgggccttgtccagccccgccgacgaggacgaggggctgtcctcttgccaggggctcctgtttcaccactacagcgcccaccgagccacccccactgcgcatgggctgcagcccaggggctgggggcgatcggcgctcctcggggctaatcttgcacactgggccgtgagccaccaacatgaactccagcttctccttctccttctgcagctcagcaatctccttctgcaggcctgacttctcctcctccagctcctctgtctcctgccacggaaagagagggatgtgagggacagcaacctgccagggaccaatctaggcaggaaagagaaaaccagtaatgttctcagacactgtgagagcagaggctcacacacctaaccacagaccccgctggtctgagtctctcagtcacctggaggctcaagattcctttcatttccaaagaaggaaagtcagcttggagagggggtaagacaacaactgcagctgccataacccagcacctactttgtgcagggcacagtgttaagcatttcagagatgatctcattcaatcttccaggagttttttggaagcagatgttatcatcgccccattttgcagatgaggaaactgaggttcagaggggttctgttaattttccaaagtcaccgagctagcaggtggggtagcccagatttgattcccaatgtatctgactccagggtctatgttctatggccttggtgccaggactgccccctcggtacccctgaggggtgagtactgcagagatctgcatggagaagggggtacggaacacagctctacccacctctctccttctcttactccccaaccccatgccagcccacctgtggatggataaacgctaagccctaggctgctagagagtggagactttgtcatgcacactcctgtatccctagcacctagaacagtgcctggcttctcagaagtgctcagcaaatccctgtgggattatcacagcctctcctcctcccttttttcactccaatttctttcttttttttttttttgagacagagtctcactctgtcttacccaggctggagtgcagtggcatgaccttggctcactgcagcctctgcctcccgggttcaagctattctccagtctcagcctcccgagtagctgagactacaggcacctgccaccacacccggctaattttgtatttttcatagagatggggtttcaccacatcgaccaggctggtcttgaacttctgacctcaggtgatccacccgcctcagcctcccaaagtgctgggattacaggcatgagccacggcgcctggccttttgctccaatttcttaagcacatatttcaggactcccagaaccctcagagaacatttggttcagccaccacgcttgacacagaagtaacgtgacagcccgagagggcctgtgaggatgccagggtcaccccgcaaggacctcagcccccttctttcatccccagccagagaagcagaagcgagcaagtgcacgtggaggggccgctgtgggaggggaagaggtgtgtgtcaccagcctcctccccacgttttccctaacatggattcctgttcatcagtgaggacatacgggcaagggcttcgttcagcagaggacagcatattccggagtgaaaaacagtttccgtctgtctcaagggtctgacgaacgtcatgagcttctgagaggcttcctgtggaggatgtggctcaggggcctgggtggctgggtcagagggcgggggaggtgggggaggcaggggagtagggtgtgaggcctctgggaggagggaaggaaagtagaggagcctcagggggcagggctattccggggcgggtggtgaggagcgccacatggggcacagctccttgaagtgccaatcacagaaaggttagtggtgggagggcccgctgaggaagtggattgtggatctgcctcacctgggaatgaagaattcccactcatcctccccggctctaacacctccgagggccattactacaggcatcacagaattcacgcaattcaattcattcaacaccccagagtgagggctgcaggacagagaaagacaagcctaagtgggtggatggtacctggaaacattaactcaagtgaggggatgggccaggcgtggtggctcacgcctgtaatcccagcactctgagaggccaaggcaggcagatcacccgaggtcaggagttcgagaccagcctagccaacatggtgaaaccctgtctctattaaaaatacaaaaattagccgggcatggtggcaggcacctgtaatccccgctagttgggaggctgaggcaggagaatggcttgaacccaagaggcagaggttgcagtgagctgagatcgtcccactgcactccagcctgggcgacaagagcgaaactccatctcaaaaaaattataataacaaaaaaagtgtgaggggatgttttccaaagccccatcctgggcagtcactgtgaggaccactgacagagtctctctcatctcctcactctgaaagcattccactggggagagtcaaccctggctcggggcttcctccacacagcacacggcccttcctgcagggccaggctctgaagggagttacgtgacgttggtcaggtcaagcttaacagagggaagggcagggctgcgggtccccaggtctgggcaattaggcggcacgggagagtgactcacaagagcagcacgcggtaccatggccacagctctgagttcatgatagaggtggggaacccgcctgcccataaaggaaatgagaaaaccccaagaaaatacaaccctgctgccacgtgacctatctccatcaagacttctccctggcccaacccagagtgcttaggccaggctgggccactcctgatggcggcaggcatgggagtggctggaacctcgggaagcagccctggatggggcaggtctggacctgccctggctcccaccctccatcatccctcacccaggagcccccacagttctgtgagcagagaacactcaggtgctgcgtaaaaaccgtggctagcacccccacagaaggttgttcatttcttccctctgggccctggctggtgctaaacgccacctccctctctctctctcttttcaatcaacacaatgctgacccatgtgtccaaaggaaggaaagctctatctccactgactcatctgtagggcatttgtgggtaaggagacagctgtgggagagaggatcaggacccccggggctctcactccagcccacccagaggtgctcccaccctacgcagagttcctcaccgcctgcagcttctctgtcagctcccggcgtcggttccggcacttggctgcagccagcttgttcctctcccgccggatgcgacgcttctcctcctcttcaggagacagct

SEQ ID NO: 2862 - DNA, 373 bp, Homo sapiens
ggagcaagtggtataatttctagggctaagtctcagccagctgccagccaccatgggccttaactcatgacagggtttcgtccctatcattcgcactacaaggaaagagtaccccagagcagatgttccccaatcaccctgggattcctggtctacaggataatgggggcctgagatgacacttttaagtgctcaacacctaacagcctgtgacttttcaaaaacagaagtctagagatgtgatcacccaacatatttgcacggttttctgagccctttcctgctcgtgatctcatccaaccaccctgacaaccttagccatacatttaattggttctttgaagatttctgggtttccagagtcaacctgttc

SEQ ID NO: 2863 - DNA, 28667 bp, Homo sapiens
ttatccaagatggactttaaaagctttggtttattctcaaaatggagtccttatatggctgatgtgaagacattcttgggctaccttgtgaaaaggctgattgacttagaaatgacctgtttggcccaagacccaactgccagcaggaaaacaggtaatatacttctcatgcgatgtggagctaggtgtttggactttccattaagagagatttaaataggcacattaagagatttatattgagtgtcaaggagagaaagtagaaatatatagaacaggcatgagcccatatatgtgtcatatatgtcacaatatatgaatggatatattcattacatagtgaatgtagggtgcttgctatagcttgtctctgcccctcctttgcaggttggggtacagagaggtttcagtttccaaccctttctgtcatttgtcttactaagatggggttctaaatcttatacatttatcttttttaaaagtgtgttataaaattatccatgatattgtattgtaatacaaattcttcaattcagagaaattccagtgtagccaatgaaaacgtaaacatacatagttacactaagcatgttgtttatacattaacataggtttatgaagctacagataataagaggtagatttttctatataatgtgagcagtgatattgacaaatgacaaatgatgacctttgttttgtctctaaaactttttagtgctgaaatccctacattcagtaatcattcagctctttaagccatggatcctggttttagaggacaacgaaaggtaaacagttttttagatattcaaattcctttgacgtttgtagacttaaaattctaaatggtatttggtagaagtgatgagttcacagatttaattttttagtgtaaggccatatttaaatttagaaaaggcttcttttcaaaacttaagacattttctatttatggaattgctagtctggatcatcagagatattatcttgataataattttggaacaaaactggacactcatttccagttttccacaataagaggttgaataaactttagtgtttaatttcagaaaaaatgatgctgttcgcttgagggttttatgagactgatttttctctactacatcagttgtgttttggaactaagttggctataaaattattgggtgggaattacctttaaatctaggactcttcaattaaagcattatttcacaagcatttgaaatacttagaggtatagagctgtccaaattcagtgagttgccttctgagtcttttttttccctgaaagtatacaagcagaagctagttgaacttgtcagggttttataaaaattacgacagtggtaaacatcacattataggagttgttttcaaaaacttgaatttgattctgagactcagagaacatgaatgtcaaactcaagtctcatagctggttggttagtgctgaagctgcgactagaactcaggtcttagacttctgtttctagactctttgcattaacccatgatgctttacgagccacttaaggaaagtataaaaggttctgaatgtttgcttttgctagagggctatctgaataatctgcaagcttcaggattttatagtgactgtgtacatatagactgcttaccatagtgctggctgcttgtttatttccagtaagaattaacggaacctatttggatattgagttttctagaccagattcagaaaataaaaaaaaattttttttaagacagagtctcactctgttgctcaggctggagtgcagtgacgtgatcttggctcactgcaacctctgcctcccaggttcaagcgattctcctgcctcagccccctgagtagctggaattacaaatgcatgctaccacgtccagctatttttttatttttatttttattttttttgtatttttagtagagacagtgttttgctatgttggccaggctggtcttgaactcctgacctcaagcagtctgcccacttctgcctcccaaagtgctgggattacaggcatgagctcccgtgcccagccaattaaatttttcatataaagaatttctctgggccaggcgtggtggctcatgcctgtaaacccagtactttgggaggccaaggcaggtggatcacttgaggtcaggacttcaagacaaacctggccaatatggtgaaaccctgtctctgctaaaaatacaaaaattagctggatgtggtggtcggtgcctgcaaccccagttgctcgggaggctgatgcagaagagttgcttgaaccctggaggtgaaggttgcagtgagccaagatcgtgccactacactgtagcctgggtggcagagaaagactctctctctcaaaaaaaaaaaaattttatttgctcattttctatttgttaatatttggccatctctttgttatgtgaatttgattttttttttttaatgctttgagtagagaaaactgttgaagctgacttagggtgtttttctacggcatttgaaatgtaaccaagatgtccaagggtctaaatttgatgtaaaaagatgttaatttaagggttatttagatagcacatttttgaaatctaattgcattggaataaagggtatgaaggagatgaaagaaaattatatggctggtgttacaagctacaattcgcctgcagttatttacagccttttaagtattctaaatgtgtgtcaggcctacataatggacaggcttccaggacttaggccagccctagacactgggacttaacagtattttaatcacggttgcattcctaagtgtgtgcttcttttctttaaagcagccaacagcggcattacccctggctagagagtgatactgtggtggcctcaagcattgtgcagctgttcactgactgtattgactcactgcatgagagttttaaaggtaggaagatgtcaggctgtctctgcttagttttcatttttccctaagtcagtcagtctttttcttctactttcctctatttaatttttatttaataggcagttatttgtgactgaagaaaagtcgctgatacaattatttagtgttaagtgtgtaactttttttttttttttcttttggagatggagtcttgctctgtcgcccaggctggagtgcagtggtgtgatctgggctcactgcagcctctgcctcccagattcaagcaattctcctgcctcagcctcccgagtagctgggactacaagcgcatgccgccacacctggctaatttttttgtagttttagtagagacggggtttcaccatgttgcccaggctggtctcaaactcctgagctcaggctatctgcccgcctcggcctcccaaagtgctaggattacaggtgtgagccaccacgcccggcctttaggtgtgtaacttcttacctttttttgttaggttgctctgagtttctcagttatggtaaatttgcagtctttctctcttccaatattgcctgtcctgcatgttgagtttcttcctgtcctccctaactcttaacctctttttcatattttctgtctttttttgctttattatgggtaatttctagaggtcttccttccatttctttagtctctctccagctctgtctcatctgcttaaaatatatcaattgaatttttcattgaagtgattattttttccatttctagatctatttgtttgtttttcaaatgtaccctgatcctttttggtagtatcttttctttcatttaaaattctattttttatttccttagaatttgtttaaacatgcttactttatgatgtatgtacattaattctattatctgaaattcctgttgggggttgtcttatgctgctgtttaattttcctttggattcttgttcttggaggcatgtttccttgtgtgtttttaaattttgtattgtgagcccatatttagagagactgatgggaatctcataaggcctaggctgagggtgtgtaagtcctccagagaggatctacatttgttgtcaattggaactacttaacttcttggtttggggtttcccgtgctaccagttacatgaaatgaaaccccaaactcacttgcgggctggcctcaattctcacagtaaactttttgatctctcctgactcacaatctagggtaaggcagagaagtttcctcttttgccccattctaccctttcagtaagaatatagtccttagaaaacctcatgttctgtcctcttgtgctgttaaaactcagcaggcaaatagtcctcggttggctggtttcagcatctgtttaacactctggcttcctctttgcttctggcccatggtgttttcttccactgaatacacctagtgcccctgtggctgccatgtgtttgtgtggcatttagttatagagtgatatggtttggcagtgtccccacccaaatgtcatcttgaattgtagctaccatgattcccatgtgttgtgggagggagccagtggaagataattgaatcatgggggcggtttccctcatactgttctcctggtggtgaatgagtctcatgagatctggtggtttgataaggggtttcccgtattgcttggctctcattctctctcttgcctgctgccatgtaagacatgcctttcatcttccaccatgattgtgaggcctccccagccacatggaactgtgagtctgttaaacctctttttctttgtaaattacccagtcttggatatgtctttatcagcagtgtgaaaatgagctaatacatacagttaagcatatgtcatccagttttgttttttttttgtaatagattttattttttgtttaacggactttattttttagagcagttttaggtttacagcaaaattaagtggaaagtacaagaattcctttataccttctgcccccacacatgcacaagccttccccactctggacattccacaccagggtgatacatttgttataattgatgaacctacattaaggcatcattatcaatgaaagtccatgatttacattagtgttctctcttggtaaacacattcggtgggttttgacaaatgacaaataacatgtgcccaccattgtggtatcatacagagcagtttcactgccttaaaaatcctctgcgctctgcctgttcatctctccctcccctcaacccctgatccttttactatctccatagtgttaccttctctagaatgtcctatggttggaatcatagcattttcagattaacttctttcacttagtaatagacattgaagtctctttatgccttttcatggctggatagctcatttcattttgtctggctgtaccttatttgtatttctgatttatcttttatatatcttatcttaccttgaagaggtgtaaactcttcatagaataacagaaatgttattctttgcttctttttgctccctacaaaactagggtaatgccatattctcagtgtgtgtttgataaatagtggttcaatgagtaacacatgaaatcctagtagtactcaattatttttttgaaaggcagacttctagctgctttttaccatccagaatatattgattactgagaaaaagatttgagcaccaaattataatcataaaggctatatatttaatttcttttttttttttccctttgagactgagtctcactctgttgcccaggctggagtgcagtggcaggatcttggctcactgcaacctctgcctcctgggttcaggcgattctcctgcctcagtctcccgagtagctgggactacaggcgcccgccaccacacccggctgatttttgtatttttagtagagacgtggtttcaccatatgggccaggctggttttgaactcctgaccttgtgatccgcctgccttggcctcccaaagtgctgggattacaggcatgagccaccatgcccagccatatttaatttcttagtataggggaaagcaccccaaggctctcttgcccctgtatatgaataaaataagaaagtggcataggacagaagggttcacagacatcaagacttggtagctgggttcaaagaaaggaaacaggagagctttgcaaggtaggatgaagaagtattgcagctttttagtgaggttatctgatccactagctccttctatggatgagaaaagtggggacctgaaaatgaaaagaatttatctgacgtcacagaatttgtgtcttggctggaactatcagctcagtctatcctaagacatccttctggatatcttctacatacttacccaactttatctaaacaaaactgtcttttatccatatttaaacgaatgctatcattaacctctgtcttaaaggttgttaaaaatgtgcattcctgttccatgccgggttgtggaattgagggtacaagcatgttagaaatgagagttgtctggtacaatgtgttgatgctcattggctttttttttggacaaggagtctcactctgttgcccaggttggagtgcggtggtgcgatcttggctcactgcaacctctgcctccctggttcaagcagttctcccacctcagcctcccgagtagctgggattacaggtgcctgccaccacacctggctaatttttgtatttttggtagagacagagtttcaccatgttggccaggttagtctcgaactcctgacctaaagtgatctgcctgcctcggcctcccaaagtgccgggattgcaagcgtgagccactgcacacagcctcgttggccattttttaaaagatttgtgttgagaaaccatcaggtttctgttcttactgtgtgtggctctctcttctttgactgcattccattagcatggaaccagaaagtctgaaaccacttgttttagactaaatgtcccttatatagtcattagcccttgaaggcattaatggaattgatacttgtgaggataatattgagtaataatccaggtctcagaaaagcgtgagatttattttagaatgacttacatgaatgacagttaatggactagtttcattgcaccaagggttaattaagttttagtcatttggaacatttccaccgtttctaaaattaaaaaattaatgttatttttgattaacaaatcataattatatacattgatgggtacagtgtgatttacagtgtggcatgattaaatcaagataattaagatatccatcaccttgcttacctttcattgtttatgatgagacatttaaagttggttctcttctgatttcgaaatacgtaatgcattgttgtggacggtagtcaccctgctgtacaatagatcctgaaacctattcctcctgccctctgaaactttgtgcccttttgatcagcaactcctcattccctcccttttcccctgacaccccacagcctctggtaactgtcattctattctctacttcaatgagttcaacttactagattccacatatgagtaagagcatgtggcatttgtctttctgtgcctcgttttcttcacttagcatgagttctccagattcattcatgttgttgcaaatgacaggatttcctcctcttctaaggcagactggtattccattgtgtatatacaccacatttagaaaaatccattcatcttttgaaggacacttaggttgtttccatatcttggctattgtgaataatgctgcagtgaacatgggagtgtggttatcccttctccctatcgatttcctttcttttggatatatacccagaagtgagattactggatcatatggtagtctatttttagttttttgacgaacctccatgcctttttccataatggttgtactaatttacactccccccaacagtgtttaagagtttctttctctccagatcctctctaacacttgttatcgttcatcttttcgataacagctatcctaacagctgtgcactgatacattgttgtggttttagtttgcatttctctaatgatcagtgatgctgagcatttcttcatgcacctattggctatttgtatgccttcttttaaaaaatggaacatttccttttgagggattttggatttctcctgagtgccaaatgaatgaagcactaaatgtgtaaaactgaatacatactgagggcaacaagctgtaggagtgtatttcagttaaaaagccatacgtttagaaattttaaagaaaagctgattatttcccacacagcatctgctcattccagttacccgagtgggtaattaaagtaccattctttattactaatctgccagtagtccccttaaccactctccctacatgaaaatctttgaaattgggtcaatcatgagaaccttagattttagacttttagttcaaatttgctttttttttttttttttaaggtaaaccaaaggtcttcagctctattttcttttcacattctagataagctgttgccaggtgatgcaggagccctttggttgcacctgatgcattattgtgaagcatgtacagcacccaaaatgccagagttcattctgtacgctttccatagcacgtaccggaaactgccatggaaggacctgcaccctgaccagatgctcatggaggccttcttcaaagtaagcccttcattcccggcatcgcagcctagagagatctggcttctagggagcagcctggtcactgtggttgttaggcatagtggcagtgtgtgctagcgtggaccatgaatacattctgtgttgcctcggtggtgcctgtggaaaacagtgtcttgtggaagtcattttatcgtgttaaaacatctacaggaccatttttaaaacccagagaaagattttatctataatatgtcagtcatcccctagactttgtcacgtgtgagtacgtagtttaatgcctccgttatgcttaatcttggttgttattgatgtgtttgtgtcattacagtttgtgtcaacaactgcttatcgttaaatgtcctattaaagcaaatgtaaattggtactgaagctattagtttcttttagcagttatgcaagtgaataatttgattataggagataaaatgcattgtgacaaccgatgatgcatcataatcgtgtgcagacctgaaatgacttaaaaaaagagagtgcatgcgagtctttgcagtagaagcaatggttacaaaaccagaaaacagagagtgtagtgtaacttacatactagtcaggcatttggagctgttgttgtttttcttcttttttttttttttaattacactcttgtcttaggtttttatggtagtttcagttcatttgttcatagtctcatcagttagtgtttactcttactgtcacatttattgttgagacaccttaagtgctttgatacagatctacagttatttatgaaggttagcaaaatatacttaacttttttagtgcccttaatggaaccccatctgtgctgctcttgtcagccactcagtagctgaaatgcaagaaaagctgagggcagttgttctagagaaatcccaggcttaagaatgattttatagctagatttagtatatgagacgggcattaagtaaatatttatcaccattatgaacatactagagaaaggtggtttaaagaactataagatggagttttaaaaaggatgaccttaactataagacagattagatagtagcacagcctgttaagggatgctgtagactctgtctctaggagttttattctaatggcagatgaccctgaccaccccagaagctggggatcttttaattctttgtgtcttgttggcataataaactatatttttttggtggggttgaggatgaggatagagaacagattataatggacaatgaagaatcattttctaaaaggaagagaattagtagttagcataatataataacagtaatgacaagaaatgaatcatcaccaaattccattgatcatgattttataaatagactagagcttttaatcttcattttgaaaggaaaaattcatgagtagccatgttttattttaaacaaattagaagtatttaaatagcttgtaagagatctttgaggtttcttatatactttatagtacatctgttcctcattctctaattttttttttttttttgagacggagtcttgctctgtcacccaggctggagtgcagtggcacgatcttggctcactgcaagctcctccttccaggttctcgccattctcctgcctcagcctcccaagtagctgggactacaggtgcccaccaccatgcccagctaattttttatatttttagtagagatgaggtttcaccatgttagccaggatggtctcaatctcctgatcttgtgatccacctgccttggcctcccaaagtgctgggattacaggtgtgagccactgcacccggcctctcatattttaaatagaatttaaacatgcagtcatcaaaaattgtaaagactaataatacggagacattgttataatacagcattacattaaaaagggaatataggccgggcgcggtggctcacgcctgtaatcccagcactttgggaggctgaggtggacagatcacctgaggctgggggttcaagaccagcctgaccaacatggagaaacccggactctactaaaaataaaataaaaaataagcaataaaataataaaataaaaaattagctgggcatggtggcaggcacctgtaatcccagctactcaggaggctgagacaggagaattgcttgaagccaggaggcggaggttgcgttgagccaagatcgtgccattgcgttccaatctgggtaacaagagtgaaactccatctcaaaaaaaaaaaaaaaggaaaaaggaaaaaggcaatataaataatatacactagtgtagtggatctcaaagtagtgtggtccctgggacagcagcatcagcattacctgggaacttacacattctggctcccaacccatacctgcaaaattaaaagctctaggggtaggcccagcagtctgttttaatataccttccatttagttctgatgcacacttaagtttgggaactactgactagtaaatttcaactttgccctgtcctggcacacctgaggattctgatacactccctgcagctccagtgacttactgtggcagcgattctccacccaggttggggttagggaaggtcattcctcgcttattaagaatgattggaataaatgctgaaatctgaacagacaaactaaaatatacacacatacactgtggaaggaaagatattacaaatattaagtctaaatctctaggaggtgggattctaagtgatataatctggggaaaaagtgttttttaaaaacataattatgaaacaatttacatacattttccagatacatagatagcacaaggcaacagaatgattttaattcattttcttttaggtggaacgaggaagccccaagagctgtttcttatttttggggtctgtactctgtgaagtcaactgggttagtgtgctctctgatgcctggaattccagtccccacccagaaacccgcagcatgattgtctgcctccttttcatgatgattttattggcaaaggaagttcaactggtagaccaaacagtaagtttgggaagcttatggcaaaaattcggcaaggctgcttagatctttgctttctactaggtcgtagtttttcatttgtttttccagtgcccctatcagtgtgaacagatgcttggcatatgagatgtacctttaaccagatgcctgattttcttggatagctcattatctgattctaaattatgcaaagaaccacactgagttagaatgtattaatcaactttattttgtatctcattaatatctacttcaatctcttgtatgcttcttgaagtcaattttggcatgtcccaccagaacagggagttcttttgaaagaaaagaacctgggttccagatactcaatacatcttaatatgaatgtgtttttgccaaaagtttggttattgctttcactagtactcctaactcgagtagatacttacttgatatcataactgttctgtgcttaccataggccatcttagtagttattccacagactagttagcaacacatatttctggaaaaattggggctctggaactaaaggaatatgtgttttatttttaggattcacctttacttagtctccttggacagacaagctcactttcatggcatcttgtggatattgtgtcgtaccagagtgtgctaagttatttcagcagccattacccgccgtccatcatcctggcaaaagaatcttatgctgaattaatcatgaagctcctaaaagtgtctgcgggcctttctattcctactgacagccagaagcatcttgtaagttgagaggtagtttaaaaggcagagactgttcctggagattggtagcagcataagtgctacaaaggacagtcgaagctaggaagtgctcagcagaggaagtcggaggatgtgtattatcatatactcatcttttggccttgtagatcttttgggttgagttctccctttgggtgaacttttacttactagcaatgtcacatgtcgatgaaaggtcaaaaggattgagggctgccagcaagctgctggtttcatgatctgaatgtcattggcagcagaatagcagggaggaagggaggttggtaatatgaacttaggcttgacagggcaagtccctcagttttctcatctgattagaaatagtaccttgcaaaggctgggtgcggtggctcacgcctgtaatcccagcactttaggaggccaaggtgggcggatcacctgaggtcaggagttcgagaccagcctggccaacatggtgaaagcccatctctactaaaaatacaaaaattagccggggaatggtggcaggtgcctgtattcccagctactcgggagactgaggtaggagaatcgcttgaccccgggggaggaaggttccctgagccgggattgcacccccgcactcccacccgggccacagagtgggactccctttccaaaaaaaaaaaaaagaaatagtaccttgtctcaaagtggtgttttgaggattgaattcgataatgaacataaaagtttttggaaaagtttctggcaagtagttagtgtttggttaatgttgttattcttgtagtaaaaaaggaagagtattctgccacaatttgggaaaacatgggccctggtcaaagtgttaccatagatttgcctttcactaggccccttggggccacgtgggactaagtcttcatgtggcttcctgttctgtcccctctactccctacccaagcattcattgcagtgccatgctcccaggaaatatgcagttaacactccttgcttggattcatttgaatgatttttttttttttttttggtcaggatgcagttccaaaatgccaagcttttactcatcagatggttcaattcctcagcaccctggaacaaaatggaaaaatcaccttagcagtcctagaacaggaaatgtctaagctcttagacgatatcattgtctttaacccgcccggtaagtgaccagtcggaagtcctgtattcattcagtcaatgcattcctgctgtgcgtaaggcactgtgagatcaggaggatgttcaggacactggcactcctctttccagagaagcaatggtcagagaggtgtttggacaccagggactcagcagtggggaaggattgacactggcagatgctgttgggtggtgggcgagactgacctttaagctggacaatgggatctaatgattaggagatatcagagacctttcagtgagcggcatttctagggattttggcttttaactgggagggcacttcagaatcacctgtagacttgtcaagaaactgtgtctggagaaccttctgctcccagcagtttggtggactagacatactgcctgcctctcctgctgaagataactgggtgctggatgaaatatttttaagaaactggaaattaaatttattagtggagtggcaaaaaggtaagggaacctcagaggccagaacctaagtgaaaggagaaacccataaaggtaggtggagttctgaggctgctgtcaccctgaagagttttgctgaatatgtttggatattagggggaggtggtaaagcccagggcctgcctaagatgggagcctaaaaggaaatccgatgcataatccacagggtgacatttttactgtaaagataagctagaagtaaacctcctcttgtgagaggaaggcaaagacagttacctgttttggcctcgttgttaggttaaatgtttatgcaggaaaagagatatctgttttgagaattgataacaagctgaccctcatgtggttttgaagcaagaattcagactacctagattggtagaaacagcagtaataacaacaacctcaatctaagaatttagagtagttctgggttggcggtgccaccagcatctggcaaaaagcaaccatagctcctgtttggagaaacgcatctttaactcatgcctcaaagttccaagaaactcacagtaaaaaaagtcacaaaacacaggaaacaaggtaccatgagcaaagtaatagaaaacaacagcagcgtcagaaatgaaaagattgaagatagtggaataattagtacagtaagcaaaaaagttatttttattatatgctgaaataagagaggattgaagatatcagtaagaagcaagggattgtagaaatatgcagatttgagagatttatataatttagaaatgaaaaatataaagattataataaagttaatggataagttcaacagattaaacccatccgaagagaaaattggtaaactggaaaacaaaactgaagaaaatactcagattgcagcacagaggaacagagaaggaacgtaaaagtgagctgggcatggaggcggaggcaggaggattgctgatggccaggagttcgaggccacagtgtgcaatgattgtgtctgaatagccactgcactccagtctgggcaaaatagtgagaccccatctctaaaataaaaagaatacgaaagtgaggttaaaaggcatagaggataggctgagaaggtttaatatacatcctattatccaagtagaattccagaaggagaggagatacttaactggggagaagcaatatctgaagagatagcaaggctgaaaattttcagggctgatgaagacagcaatcctcaaattcagtaaacccagcaaatcccaagtaggatatatggaaagaaattcaaacctgtatacactatagtgaacctgcagaagtaccagtggcaaaattaaaaaacaaaacaaaacaaaaccctttacatccaggaaggaaaggcagattacctaccaaggagcaacatttagactgacagctgacttctcagtatcaataaaagaatctgtaagacagtgggataacaacttcaatgtgctatgagaaaatgactcataacctagaattgtaaactaagaaaagccaccctttaatgatgaagacgaggtaaagaaccatactttcattgagccctgagagtgtttgtcccagtaggtgtcactaaagaaaatactaaagcatgctaggaaggaggttgagttaaaagtgttctaaggttctactgctgtttagtggtcaagagattaactttataccttgattaaagtatgaatattaacaattttaagaaattaaccaaaagaatagaaattaaaatgtacaatttccaagtcagtagagggagataaaaaggaatgtccaaagtatgttcagtccaaagaaggcaagaaaggaagcatggagaaagtgagaaaaataaccaaaataagatgataaaattcaaatgtattggtaaagggactaatgcttaagttaaaagacaaagattgttaaggtaggttaataaccaaaaacatctagctttaagctgttgataagaaatacatcaaaagcctaaggatatagaaagctttccacaagatgattatgtcaggcaaatattaaaatagaaagctggcatagctatattaatatcagataaatagatctgtaaggcagaaaactttgtaaaagccagatgttcatctctgtgtatttctgccccgaagttgcatgacaaagaaaaaaaaatcagtaactaaatagaactagagggaaaaacactgtggaaattaagaagcaaacttttaaataactgatggccaaaggaataatcataatagaaatttaaaatacttacaactgaataataaaatacagtgcatcaaaatttgtgggatgcagctaacatgggacttattattttagcctgttctcacactgctataaagaaaaacccaacactgggtgatttataaggaaaacaggtttaattggcttatggttctggaggctgtacaggaagcatggtgctgccatctgctcggcctctggagaggcctaaggaagcttacaatcacggcagaacgcagagtgagagtaacactccacatggccagagaaggagcaagagagagaatgagcaagggggagatgttgcacacttttaaactacgacatctctgagaactctagtatgagaacagcaccaagaggatggtgctaaaccattcatgaaggacctacccccatattcagccacctcacactaaactctgctccaacattggggactacggttcaacatgagatttggtggggacacagatccaaaccgtatcacttactttcagggccttaagtgctcatcatagacttttttaaaaggtgaaaattaaaaagataagcattaaacagttatttaaaaagacggcaaaattacagtcaaagacagtagaggggaggaaataataaagagaaaataaataggaagaaactaagaatgaagaacaatgaaactggtaaatgtgtgggtaaatctaaatgaaatctgactgtataagacaataataatagaaatggtttgttgggctatggcaacagtggagaaatgaagttagaatgttccaaagccattacatcatctgggaaccaattaacattagacttcaaaaaatcaggaatgcatgttttcatttataggataaccactgtcagaattttaagagaggatttagttttcaagctaaaacagggaaaaagtagaataatgatctaaaagaagcaaaagagagaaaaagaaatgtagaataggagggacaaataggatacatataggaagacagtagatttagacccagctacatcagtaattaattataataactgtgaatgactaagattgtcataccagataaaacaaggaagaaaaagacaacttagtagaaaaaaatggacaagacccttgaaacgacattctgcaaaagaaaatatactgatcaccaataaacatgaaacggtgctaaatgttgttaatggtcatacctgtttcatgtagatattgtaagtattgagtgagataatatctaaaattttagcatcagcctggcaagtcagccacattcaataaatcttatggaaaaaaactatcagcaagcaatgctggagaaactgttctagagttggtcagatatgattgaaccaggaaggttgaataatagctggccagggaaaggagagaagggtgttctggaaagatcttcatcggaagagtgataggatcagatatggtatttaggaaaagatttgagagccctgttgatatgaacaggaatgggagagactagggtctgttgtagtaatctattcctattagtcataattaagagataaaatttaaattgctattccgttgaaattcagagatgagcctttatttccaagaatatttgtacccatagaaatacatgaagaaatagacagatatactgttactatctctctcaaacttgttttttaagtccttgcttgatagtaagtaggtcgtacagaaagattaagtgagggtttatttaaccctgcataagtagatgaatttgttttgatagatgcgatgagtaagatctctcaactttttacccttcctattgacataaatactgaatccttgtggtgtgaaagctacagcttgaggagagctagaagagttggcaaaaattattccatttaactctcagtaaaatatattttctgtttttgaatgtgaagatttgcagttctcttgtaaaatgaattcgttctttttcttgaattcctctctctttacctccaattttttttgaaaaattaccagttggtttactttccttatttaaaaaacaaagaaataaaagagctgctgttaggacactttacaaaggtttttccttacatttatatttagttttaagtaataacctttaatgtgtgtaaatcaccctagaatattgacagcggtggcagtgacagtgggtacttttgctacttggtttactgaatgactggtgagatctacgtatttggttttccatgagcaaaggttggaaaataaagactgactaggcatgttctgataagttactctttcacaccagcttcagatttgtctatttattaagtattgctctgctatgctgctgtacccagggaactcacagtagttcctgcttttactcttagtaaccgtgtgccgcatactacctgtacaaacttaacaccatccagagccttccttccagtcccttgcagtcagctactagcactgtaaaatctgcctggagaacagctaagattgaagcactgttattctcctgatcacatggatagtacctttctggcagccattcttgagtgtgtctatattcctttcagacatggacagccagacccgccacatggccctcagcagcctctttatggaagtcctgatgatgatgaacaacgcgactattccaacagcagagttccttcggggcagtatccggacctggattggccaaaaaatgcatgggctggtggtgctgccccttttaacagcagcctgccagagcctggcgtccgtccgccacatggctgagactacagaagcctgcatcactgcctacttcaaagaaagtaagaggaggtcatcttacgctccattgtattggtcttttccagaaagatgaaagcattgtcatcagcagatatgtttccagactcttcccagtgagggatttgccattctaattttctgctctacaaatgttgtggatgtttctgaatatacgtatttttcataaagatctgcagttagcatgagaacctgtggccatgtctgttggtacaatcacatttcaagggagaaaagctctaatccacttcacgttagttttggagggtcagaccaacctgttatgatatgcaaattgtgttgtgtcacaggccaagtcatagtcctcagaacaaatgctatataccaggatctatataatcatagtccatgaggttaattttccctgtttttgtcacttttggtaaaaggagttttcatagaagtttttaaaattgctgcttatcagaccttttaaagcattatgaagggctcattcattgtcacccctcctttttaaaaatctgttttactttctacctctaaactgtcagactctggaagcggcttagtctgattaagaattgctgagaacagcacttctcaactctgatatccagataacacatcacactgcagtcagtgggagagaagcagtagtgagaaggagggtatcggagcaaggatccaggaagtgcccacaacctgccatctgccctgtcctgaccacccatgaacagcacatgcccacccatggaggtggtgtgcatgtcaccatgccaccccaccctcgctcccccaaagagtggagaaccattaggataacactgctattccaaactcatgtgtgttactaaaaatcaaacagtttcaatacatgagttaaactaagctttgataagtaaaactactcacagattgagtgataacagtttcccgtcggaaagcataagtgttcatatgttcttaaaaagggtattaaagttaaaattcttaactgaccaggacaggcagtgtctacatgtggttttaaggatcataatgtgatagaaaggtgatttatacgtatgcagccctgaattctgatttcttaaacctttctggtggctacgctggggacaggcatctggcctgagggctatccagtctgagccctgaggtatatttgacttttgtagcctccaaggtcactgtaagaaaggttgtcttgacatgaagcttattatctcataggttgctatgtcaaaaaaaaaaatcatgaagcttaaagtgaaaatatttgctagagttgtcaagtaattggattcttgcctatatcttgatgtctcttcttcatgttcttaggccctctcaatcagaattcaggatggggacccattctggtatcccttcaggttcccgagctcaccatggaagagttcctgcaggagtgcctcaccttgggcagttacttgactctttacgtctacttgcttcagtgtttaaacagcgaacagactttaaggaatgaaatgaaagtgctgctcatcttaagcaagtggctggaacaggtgtacccaaggtacgttggccctcaggctgttacatcaaacttgctgtatttggttaacttggaatttagagcttaagtctagctttaagtacacagaaccaagaggtgcataaaaaataaggttttaaggtatggtgacagttgttttggaaagattcttaattaataggctaatcttctgagcagattttttgtttcctaaaactggcactttgaaacaccaagcatcagtttccttaccagttaagtggagatagtaatccctacctgatagggctgtcatgaggatgaagtggaagaacacgaagttcatcacagtggcgtgtagtaggtgttccacagatggcggtggttacaatcccatggctctattaacatcagccgttagcctgtgcttttgaagtactgaatgtctcctatccttcaaactctgatgtggacttgcagttaaatgggagtgggaaaaatttacttctaattttattttcctccggtgcctcccctagctccgtggaggaagaggcaaagctgtttttgtggtggcaccaagtccttcagctctccctcattcagacagagcagaatgactccgtcctgacagaatctgtcattcgaattctgctcttggttcagagcaggcagaacctcgtggctgaggagagactcagctctgggatcctgggggcaattgggtttggccggaagtcgcctttgtctaacaggtaaggaagcgcctttctaacactgttgttctaaataggcctcagacatctgtacctacttacaggttgtgatatacttcagtaggtttttcgacttaggatctaggttctccagaaagattaatggaaaaaaaaaaagaaaaaaaaaacagagcctgattacatctttacattctaaaaagcatttttattttttcttacctttaaaaaaaattttcaattcaaacagtatttttaatagtatctcctgttgtgtttggactttgtaacctaactgcactactgatttctttttggttttgagctagtcatggacggtatgcgagcatagtttaaaagccaagtcagctgggcacttgaggcgttcagggaaatccagaacctgtgagggactcagtctagtgaactgtaaagtcgtcaagctgggttaagatctgttggtggccaggcgcggtggctcacacttgtaatcccagcactttgggaggccaaggcaggcagatcacttgaggtcaggagttcgagaccagcctggccaacatggtgaaaccccgtttctaccaaaaaatacagaaattagccgggcatggtgatacatgcctgtagtcccagctactctggaggctgaggtgggagaatcgcttgaacccgggagacagaggtttcagtgagctgaaattatgccactgcactccagcctaggtgacagagtcagaccctgtctaaaaataaataaataaataaataaataaacacaaatataaaaattagctgggtgtggtggcaagcacctgtagtcccagctactcaggaggctgaggcaggagaattgcttaaacccaggaggcagaggttgcagtcagccgagatcacaccattgcactccagcctggccaacagagcaagactctgtctcaaaaaaacagaaaaaatgaataaaaggcctgttggtaagaaggataagtaatgagaagcaagtctggatttttgttgcaaaaaatcccaaggcatggaagaatttgccattagctcctgttttctctcataatacttacttacatcatggtttccttttcaagcccttgtcagtgttgaaaagagtttgcaaacttgatgatgtcagcattcttgtggaatagcccattgtgatgttgtaactttgggactcactcattccaaaccagttaacgtcatgtttttttgtttgcggtggaagatagcaggactgcgagattttgttttacttaaatttggcttgcgtcttttattctttttaattgtgataaaatacacataacttaaaactttccatggtaaccatttttatatgcacaattcagtgacatttagaacattgacaatgttgttgtagccatcaccacaatctagcttcagaacattttcatcactccaaaaggaagccctacactcattaagtagtcacctccattccctttaatccccgtgtctctagtaaccactaattgacattatgactttatgtattgaatcctattttggacatttcatataaatggaatcatataatgtgtggccccttatgttggacttttttcacttaacataaagttttcaaggttcatttatgttgtagcatgtatccatacttcgtttgtttttatggctgaataatattcctttgtattccacattttgtttatccattcattagctgatggacatttggattgtttcaaccttttggctattgcagataatgctgctatgagcatttgtataccagtttttgttagaacatctgtttttagttttttgtgtatacctaggagcagaattgctgggtcctatggtaactctatgcttcacttgttgaggaactgccaaactcttttccctagtgcctgcaccatttacattcccaccagcaatgtgcaagggttccagttactccacatctttgccaacactttcattcttgaatctgaattatacatatattgtttggatggtgataatggataaaacttcttcttgatcatatttaagattttcctgagaaggtgaacaacacagtagatctggaaatgtgttcatctttttatgtcatagaaaatatggtgtttatttcaaaatgcttactttaatagccatttacttcttctgacctctccctaatgcctaaggttccgagtggttgcccgaagcatggctgccttcctttcagttcaggttcctatggaagatcagatccgtttgaggcctggctctgaattacatctgacccccaaagctcagcaggtcagtatatacaatgaagggttagaagtttgcctgcacatcttccctagaaggcagggaggtggcagccgtagcctgtgcgcgtcatgacatgatgctctgtggtggtagcacagtgttccctttcatgtgccctacttacgggaaaatggtttcatgtgccaacctccaaatttttgtaggcagttgtctagatcgctgctactgtcattgtagaaaagtaaggccaaacgaaaagtctgtctagcattaaatttggttctgataagtgtgaatatgcacttatctaccacatgcttgggctggggcaggggctggagctggggactgggatctcgcacagaagatgtggctacagttgggatggatggaaattagctgagctttagcttggaaccgagaaagtagttcctgttttgtgagtctgaaggttgactattgttggctgatgctagaataacctaacatggacagaatggtagctagaaattatagcttcttctaaaaacatggaaggccacattcctataacctatggacatgctggccaggtacaaaggtgcacagtaaaaaatgatgatcagcattcgtgagtactccctctgtgccaggtactattataagttttaactcgaccaatattagtgagttaaagctttaactcatttaatcctcatagcaatgctatagcacagaaacgactttattttttaagacagggttttattctgttgcccaggcaggagtgcaatggtgtgatcatatctcactgcagccttgaactcctgtgctcaagcaatcctcccacctcagcctcccaagtagttaggactacaggcatgcattgccactcctggctaattaaaaattttttttgtagagactgggtctcgctttgttgctgaggttggtctcaaactcctggcttcaagcgttcctcttagcctcagcctcccaagtgttggtattacaggcatgagccactgcatccagctgggaactattattatcctggttttttggatgaggaaagagagagagagagagaaaggctaagtaatttgtcccaaattacacacctagtaagtgttggggctggaagtcgcactggccagtctggctccaggcctctcccattccctgctctgcagggctgtctctgtaagtgctcagagcttgaacaccttagctcctctgctggggcaactttgtcatgtctaagccagccacatgcaatgtcagatcttggttattaagagcaaggatcagacagaataattagcagattagcaggttctccacagggatctgggcttataaaatagctgatagttgtcactcattgcctagacagctgctgtttgaatcccctattgtcttacatgaaacatcccagtgggcagatgaatatcctgagggcaggttgtgaagtcagtgagatgcagggtgtatttgagaagactacgtctcctgtggccaccagtacctgcagcatcagtttcttgctttagctggggccctgggctgcccaggcctggcctctttgccttcatttctttggacttaaagtgatgactccctgtatgtcccatacatacttgtcatcaggattttcagatttgaagaaagttgtctttttagaaaatgattatcgttaggcaaactgtcaaagtagactgtttgggggactaaatttaaagaaggaaaagagagggagagagacagagggacactgtgattcatgggaatgcctgtcccagttgattcctattcttaaattgaactctgtttacatagctcttaatttggtacccagataccttcagtttattttcagcccaaagacttccatctacagccctcctggtagttaatttctaaaattctggtttatttatcatcctcaaaaaaatcccctctcttatggtttttgaatcaagcacattccatcttttaatacatattttctagtgcagtggtttctgtaaaagggacaaggagggagtggggcactccatggtgggggatgtgccccagtgaggaggggaacaccgtcagaatcctggggtggatgagcttgttaagttggaaaacaaaactcctcaccccaaaaatcaagagccattgttgattttttgttttctccatatacagtctcttccccttctcttctcctactatgaagaaaggaataatcaaaattctggagtcaaagaatgcttttctttccttcctctgaagagaggcatggaaacagtttctgccatgattttgtgtcatttgtcagatggattcgggaggaacctatgtacttcatgcttgttggctgatttaacaaccttctcacttactcttggcagcacttagcaactggttcctctagaattcctttccgttagacagtttcatataacattatctcataacctaggaacatacccaacagcagattgaacagatttcaccttagcaagatgaggctggtgcctgggatttccggttgcgccctagaacggaaggagtggacaatctggtggggaggaccccacaggtgggactggggagaacgaggacaaggcaggctttagaaatcggtgtggcaggtgaggcgcccagcaacaagagcagcctgccacagcagtggctcttggtaaggcaaggttgggaaatggcacagaacagaaacagggaaggctgggtgtgggatgctgcaaaggccacagaggcttgggctgctggcctccttctggttgtggttaagttaatcaatgcctgccttccggactcctggcctcagttctgtaggcctccttcccacaaggctcacagttgaagtacacagtgataatgggtgtgctgtacctctggcagtcacattatgtgcctctatggagttaaccctctcatcttccgtgtcttttaggctctgaatgctcttgaatccatggcatcaagtaagcagtatgttgaataccaggatcaaatattgcaagccacccaatttataaggcatcctggccattgccttcaagatgggaaaagcttcttggctcttctcgttaactgtctgtatccagaagtgcattatttggaccacatacgatagttaacactgaggctcttgaaaaacccattgctgtttatgtttacatttaactttgctgttgcacaagtaactttgctcaattgcactgtagagctcagtttggccaatgtgtagttgactgagatgcaagttgggaggcgttagatattagataattttggggtgtgtgtgtgtgtgtgtgtgtgttttcttagctcttaagaccttctggggactctttaagtttttatatttatccacaagagaaacttactaagttccacttgggtgcagagccactcacagttgccgaatgtcccagtcatctcacaagacctccagatggagttctttgtatgtttccacttctgtctctgttttatgtaaatgttccagatctgacaaccttggaagtcactcagtacccttacttttaaaccccatttgtgttcctccaaagtaaagaagtcaattttgaaaaatttctgcatttctcaaatgtggacaaatacaatagttttaaagtattgtttttctcagaagggagataaaaatgccgagttagttaaagtgggtcatgtgtaaaatacgaccacttgatcgtgattatagtgggcagtagagatgatgacaagtcaatttccatccagccgtgtatcctcatggagaagctgcctgtctgaatcaggatggcaagctggcagtctgggaggagcatgttttgcacagatgttttgtttggtccacttggtgaggagtgcagacagggctgcctctctctagtcgggagagtctgtgcattccctcgggccctgaccctagcctcattcacatcacttgcccctgtcgacacctaagtttgcaccctttgatagacaccatgttcgatatctgaaaggctcagtgtcaggagacagagactgagggagactgaagacctgattctctgttccctgcttgttttttaacttcaaactcagatgaagccaatggacctgctgaaacacttgtctgtggaaactgggtcaggtcgggagatctactgaaatttggctttttttccatagccacgtgccttctgttgttgacagttcattcattaccaaagcctgtgtgtaactttgccttgttctgtggccatcttcttgctcatgttatttctcctgggaatgagcagtttgacttctgttcccacgttcctcattctatcagctctagatggattttgcctgcatagctggcttaatatgtctttgtgtatgggtagtctgtagcctgagaatatttacctaaaaatgtctaaacagccaccaagaatgtttataggggtataggaatatagttaacagagtgctaatctctcctcaaatgtccttttggaatgcttcccccaaaattgggaagttggtaggagcttttctttactttgaatttctttacttggacagaacgattctgccttaaagacacgctttgcagctctgataaagaacatccctgtttagtctcttgagttttacaggccacaaaatgtccgtctcagagggatctgtctcagcttttcttatttttgcttctctccgttttcaaaattaatcatcttgttctctgtataagaaaatttgagaagctgtggacaatttaatagtctgatctggcaacagcgatttttgtttggaaatattttgtgttttctttgaggaggatataattactgatatcctaggatgtgaaatttttgagtgacagtatgcacattttaaagaaaattatgattaatctgtataatgttttttggtctgtaaaaattataaaaaataaaatcatttatctttggttgtaactgtttaaaaaccaaattatagggatatcacactatcttgtaaagtgtttcagctgttaaagttgctgtaggtttttatgcctgatgtcatttaatttatttgacattgaacttcattaataatcagagatggtcagtgaaagcgc

SEQ ID NO: 2864 - DNA, 28668 bp, Homo sapiens
ttatccaagatggactttaaaagctttggtttattctcaaaatggagtccttatatggctgatgtgaagacattcttgggctaccttgtgaaaaggctgattgacttagaaatgacctgtttggcccaagacccaactgccagcaggaaaacaggtaatatacttctcatgcgatgtggagctaggtgtttggactttccattaagagagatttaaataggcacattaagagatttatattgagtgtcaaggagagaaagtagaaatatatagaacaggcatgagcccatatatgtgtcatatatgtcacaatatatgaatggatatattcattacatagtgaatgtagggtgcttgctatagcttgtctctgcccctcctttgcaggttggggtacagagaggtttcagtttccaaccctttctgtcatttgtcttactaagatggggttctaaatcttatacatttatcttttttaaaagtgtgttataaaattatccatgatattgtattgtaatacaaattcttcaattcagagaaattccagtgtagccaatgaaaacgtaaacatacatagttacactaagcatgttgtttatacattaacataggtttatgaagctacagataataagaggtagatttttctatataatgtgagcagtgatattgacaaatgacaaatgatgacctttgttttgtctctaaaactttttagtgctgaaatccctacattcagtaatcattcagctctttaagccatggatcctggttttagaggacaacgaaaggtaaacagttttttagatattcaaattcctttgacgtttgtagacttaaaattctaaatggtatttggtagaagtgatgagttcacagatttaattttttagtgtaaggccatatttaaatttagaaaaggcttcttttcaaaacttaagacattttctatttatggaattgctagtctggatcatcagagatattatcttgataataattttggaacaaaactggacactcatttccagttttccacaataagaggttgaataaactttagtgtttaatttcagaaaaaatgatgctgttcgcttgagggttttatgagactgatttttctctactacatcagttgtgttttggaactaagttggctataaaattattgggtgggaattacctttaaatctaggactcttcaattaaagcattatttcacaagcatttgaaatacttagaggtatagagctgtccaaattcagtgagttgccttctgagtcttttttttccctgaaagtatacaagcagaagctagttgaacttgtcagggttttataaaaattacgacagtggtaaacatcacattataggagttgttttcaaaaacttgaatttgattctgagactcagagaacatgaatgtcaaactcaagtctcatagctggttggttagtgctgaagctgcgactagaactcaggtcttagacttctgtttctagactctttgcattaacccatgatgctttacgagccacttaaggaaagtataaaaggttctgaatgtttgcttttgctagagggctatctgaataatctgcaagcttcaggattttatagtgactgtgtacatatagactgcttaccatagtgctggctgcttgtttatttccagtaagaattaacggaacctatttggatattgagttttctagaccagattcagaaaataaaaaaaaattttttttaagacagagtctcactctgttgctcaggctggagtgcagtgacgtgatcttggctcactgcaacctctgcctcccaggttcaagcgattctcctgcctcagccccctgagtagctggaattacaaatgcatgctaccacgtccagctatttttttatttttatttttattttttttgtatttttagtagagacagtgttttgctatgttggccaggctggtcttgaactcctgacctcaagcagtctgcccacttctgcctcccaaagtgctgggattacaggcatgagctcccgtgcccagccaattaaatttttcatataaagaatttctctgggccaggcgtggtggctcatgcctgtaaacccagtactttgggaggccaaggcaggtggatcacttgaggtcaggacttcaagacaaacctggccaatatggtgaaaccctgtctctgctaaaaatacaaaaattagctggatgtggtggtcggtgcctgcaaccccagttgctcgggaggctgatgcagaagagttgcttgaaccctggaggtgaaggttgcagtgagccaagatcgtgccactacactgtagcctgggtggcagagaaagactctctctctccaaaaaaaaaaaattttatttgctcattttctatttgttaatatttggccatctctttgttatgtgaatttgattttttttttttaatgctttgagtagagaaaactgttgaagctgacttagggtgtttttctacggcatttgaaatgtaaccaagatgtccaagggtctaaatttgatgtaaaaagatgttaatttaagggttatttagatagcacatttttgaaatctaattgcattggaataaagggtatgaaggagatgaaagaaaattatatggctggtgttacaagctacaattcgcctgcagttatttacagccttttaagtattctaaatgtgtgtcaggcctacataatggacaggcttccaggacttaggccagccctagacactgggacttaacagtattttaatcacggttgcattcctaagtgtgtgcttcttttctttaaagcagccaacagcggcattacccctggctagagagtgatactgtggtggcctcaagcattgtgcagctgttcactgactgtattgactcactgcatgagagttttaaaggtaggaagatgtcaggctgtctctgcttagttttcatttttccctaagtcagtcagtctttttcttctactttcctctatttaatttttatttaataggcagttatttgtgactgaagaaaagtcgctgatacaattatttagtgttaagtgtgtaactttttttttttttttcttttggagatggagtcttgctctgtcgcccaggctggagtgcagtggtgtgatctgggctcactgcagcctctgcctcccagattcaagcaattctcctgcctcagcctcccgagtagctgggactacaagcgcatgccgccacacctggctaatttttttgtagttttagtagagacggggtttcaccatgttgcccaggctggtctcaaactcctgagctcaggctatctgcccgcctcggcctcccaaagtgctaggattacaggtgtgagccaccacgcccggcctttaggtgtgtaacttcttacctttttttgttaggttgctctgagtttctcagttatggtaaatttgcagtctttctctcttccaatattgcctgtcctgcatgttgagtttcttcctgtcctccctaactcttaacctctttttcatattttctgtctttttttgctttattatgggtaatttctagaggtcttccttccatttctttagtctctctccagctctgtctcatctgcttaaaatatatcaattgaatttttcattgaagtgattattttttccatttctagatctatttgtttgtttttcaaatgtaccctgatcctttttggtagtatcttttctttcatttaaaattctattttttatttccttagaatttgtttaaacatgcttactttatgatgtatgtacattaattctattatctgaaattcctgttgggggttgtcttatgctgctgtttaattttcctttggattcttgttcttggaggcatgtttccttgtgtgtttttaaattttgtattgtgagcccatatttagagagactgatgggaatctcataaggcctaggctgagggtgtgtaagtcctccagagaggatctacatttgttgtcaattggaactacttaacttcttggtttggggtttcccgtgctaccagttacatgaaatgaaaccccaaactcacttgcgggctggcctcaattctcacagtaaactttttgatctctcctgactcacaatctagggtaaggcagagaagtttcctcttttgccccattctaccctttcagtaagaatatagtccttagaaaacctcatgttctgtcctcttgtgctgttaaaactcagcaggcaaatagtcctcggttggctggtttcagcatctgtttaacactctggcttcctctttgcttctggcccatggtgttttcttccactgaatacacctagtgcccctgtggctgccatgtgtttgtgtggcatttagttatagagtgatatggtttggcagtgtccccacccaaatgtcatcttgaattgtagctaccatgattcccatgtgttgtgggagggagccagtggaagataattgaatcatgggggcggtttccctcatactgttctcctggtggtgaatgagtctcatgagatctggtggtttgataaggggtttcccgtattgcttggctctcattctctctcttgcctgctgccatgtaagacatgcctttcatcttccaccatgattgtgaggcctccccagccacatggaactgtgagtctgttaaacctctttttctttgtaaattacccagtcttggatatgtctttatcagcagtgtgaaaatgagctaatacatacagttaagcatatgtcatccagttttgttttttttttgtaatagattttattttttgtttaacggactttattttttagagcagttttaggtttacagcaaaattaagtggaaagtacaagaattcctttataccttctgcccccacacatgcacaagccttccccactctggacattccacaccagggtgatacatttgttataattgatgaacctacattaaggcatcattatcaatgaaagtccatgatttacattagtgttctctcttggtaaacacattcggtgggttttgacaaatgacaaataacatgtgcccaccattgtggtatcatacagagcagtttcactgccttaaaaatcctctgcgctctgcctgttcatctctccctcccctcaacccctgatccttttactatctccatagtgttaccttctctagaatgtcctatggttggaatcatagcattttcagattaacttctttcacttagtaatagacattgaagtctctttatgccttttcatggctggatagctcatttcattttgtctggctgtaccttatttgtatttctgatttatcttttatatatcttatcttaccttgaagaggtgtaaactcttcatagaataacagaaatgttattctttgcttctttttgctccctacaaaactagggtaatgccatattctcagtgtgtgtttgataaatagtggttcaatgagtaacacatgaaatcctagtagtactcaattatttttttgaaaggcagacttctagctgctttttaccatccagaatatattgattactgagaaaaagatttgagcaccaaattataatcataaaggctatatatttaatttctttttttttttttcctttgagactgagtctcactctgttgcccaggctggagtcacaggggcaggatctgggctcactgcaacctctgcctcctgggttcaggcgattctcctgcctcagtctcccgagtagctgggactacaggcgcccgccaccacacccggctgatttttgtatttttagtagagacgtggtttcaccatatgggccaggctggtttgaactcctgacctgtgatccgcctgccttggcctcccaaagtgctgggattacaggcatgagccaccatgcccagccatatttaatttcttagtataggggaaagcaccccaaggctctcttgcccctgtatatgaataaaataagaaagtggcataggacagaagggttcacagacatcaagacttggtagctgggttcaaagaaaggaaacaggagagctttgcaaggtaggatgaagaagtattgcagctttttagtgaggttatctgatccactagctccttctatggatgagaaaagtggggacctgaaaatgaaaagaatttatctgacgtcacagaatttgtgtcttggctggaactatcagctcagtctatcctaagacatccttctggatatcttctacatacttacccaactttatctaaacaaaactgtcttttatccatatttaaacgaatgctatcattaacctctgtcttaaaggttgttaaaaatgtgcattcctgttccatgccgggttgtggaattgagggtacaagcatgttagaaatgagagttgtctggtacaatgtgttgatgctcattggctttttttttggacaaggagtctcactctgttgcccaggttggagtgcggtggtgcgatcttggctcactgcaacctctgcctccctggttcaagcagttctcccacctcagcctcccgagtagctgggattacaggtgcctgccaccacacctggctaatttttgtatttttggtagagacagagtttcaccatgttggccaggttagtctcgaactcctgacctaaagtgatctgcctgcctcggcctcccaaagtgccgggattgcaagcgtgagccactgcacacagcctcgttggccattttttaaaagatttgtgttgagaaaccatcaggtttctgttcttactgtgtgtggctctctcttctttgactgcattccattagcatggaaccagaaagtctgaaaccacttgttttagactaaatgtcccttatatagtcattagcccttgaaggcattaatggaattgatacttgtgaggataatattgagtaataatccaggtctcagaaaagcgtgagatttattttagaatgacttacatgaatgacagttaatggactagtttcattgcaccaagggttaattaagttttagtcatttggaacatttccaccgtttctaaaattaaaaaattaatgttatttttgattaacaaatcataattatatacattgatgggtacagtgtgatttacagtgtggcatgattaaatcaagataattaagatatccatcaccttgcttacctttcattgtttatgatgagacatttaaagttggttctcttctgatttcgaaatacgtaatgcattgttgtggacggtagtcaccctgctgtacaatagatcctgaaacctattcctcctgccctctgaaactttgtgcccttttgatcagcaactcctcattccctcccttttcccctgacaccccacagcctctggtaactgtcattctattctctacttcaatgagttcaacttactagattccacatatgagtaagagcatgtggcatttgtctttctgtgcctcgttttcttcacttagcatgagttctccagattcattcatgttgttgcaaatgacaggatttcctcctcttctaaggcagactggtattccattgtgtatatacaccacatttagaaaaatccattcatcttttgaaggacacttaggttgtttccatatcttggctattgtgaataatgctgcagtgaacatgggagtgtggttatcccttctccctatcgatttcctttcttttggatatatacccagaagtgagattactggatcatatggtagtctatttttagttttttgacgaacctccatgcctttttccataatggttgtactaatttacactccccccaacagtgtttaagagtttctttctctccagatcctctctaacacttgttatcgttcatcttttcgataacagctatcctaacagctgtgcactgatacattgttgtggttttagtttgcatttctctaatgatcagtgatgctgagcatttcttcatgcacctattggctatttgtatgccttcttttaaaaaatggaacatttccttttgagggattttggatttctcctgagtgccaaatgaatgaagcactaaatgtgtaaaactgaatacatactgagggcaacaagctgtaggagtgtatttcagttaaaaagccatacgtttagaaattttaaagaaaagctgattatttcccacacagcatctgctcattccagttacccgagtgggtaattaaagtaccattctttattactaatctgccagtagtccccttaaccactctccctacatgaaaatctttgaaattgggtcaatcatgagaaccttagattttagacttttagttcaaatttgcttttttttttttttttaaaggtaaaccaaaggtcttcagctctattttcttttcacattctagataagctgttgccaggtgatgcaggagcccttgggttgcacctgatgcattattgtgaagcatgtacagcacccaaaatgccagagttcattctgtacgctttccatagcacgtaccggaaactgccatggaaggacctgcaccctgaccagatgctcatggaggccttcttcaaagtaagcccttcattcccggcatcgcagcctagagagatctggcttctagggagcagcctggtcactgtggttgttaggcatagtggcagtgtgtgctagcgtggaccatgaatacattctgtgttgcctcggtggtgcctgtggaaaacagtgtcttgtggaagtcattttatcgtgttaaaacatctacaggaccatttttaaaacccagagaaagattttatctataatatgtcagtcatcccctagactttgtcacgtgtgagtacgtagtttaatgcctccgttatgcttaatcttggttgttattgatgtgtttgtgtcattacagtttgtgtcaacaactgcttatcgttaaatgtcctattaaagcaaatgtaaattggtactgaagctattagtttcttttagcagttatgcaagtgaataatttgattataggagataaaatgcattgtgacaaccgatgatgcatcataatcgtgtgcagacctgaaatgacttaaaaaaagagagtgcatgcgagtctttgcagtagaagcaatggttacaaaaccagaaaacagagagtgtagtgtaacttacatactagtcaggcatttggagctgttgttgtttttcttcttttttttttttttaattacactcttgtcttaggtttttatggtagtttcagttcatttgttcatagtctcatcagttagtgtttactcttactgtcacatttattgttgagacaccttaagtgctttgatacagatctacagttatttatgaaggttagcaaaatatacttaacttttttagtgcccttaatggaaccccatctgtgctgctcttgtcagccactcagtagctgaaatgcaagaaaagctgagggcagttgttctagagaaatcccaggcttaagaatgattttatagctagatttagtatatgagacgggcattaagtaaatatttatcaccattatgaacatactagagaaaggtggtttaaagaactataagatggagttttaaaaaggatgaccttaactataagacagattagatagtagcacagcctgttaagggatgctgtagactctgtctctaggagttttattctaatggcagatgaccctgaccaccccagaagctggggatcttttaattctttgtgtcttgttggcataataaactatatttttttggtggggttgaggatgaggatagagaacagattataatggacaatgaagaatcattttctaaaaggaagagaattagtagttagcataatataataacagtaatgacaagaaatgaatcatcaccaaattccattgatcatgattttataaatagactagagcttttaatcttcattttgaaaggaaaaattcatgagtagccatgttttattttaaacaaattagaagtatttaaatagcttgtaagagatctttgaggtttcttatatactttatagtacatctgttcctcattctctaattttttttttttttttgagacggagtcttgctctgtcacccaggctggagtgcagtggcacgatcttggctcactgcaagctcctccttccaggttctcgccattctcctgcctcagcctcccaagtagctgggactacaggtgcccaccaccatgcccagctaattttttatatttttagtagagatgaggtttcaccatgttagccaggatggtctcaatctcctgatcttgtgatccacctgccttggcctcccaaagtgctgggattacaggtgtgagccactgcacccggcctctcatattttaaatagaatttaaacatgcagtcatcaaaattgtaaagactaataatacggagacattgttataatacagcattacattaaaaagggaatataggccgggcgcggtggctcacgcctgtaatcccagcactttgggaggctgaggtggacagatcacctgaggctgggggttcaagaccagcctgaccaacatggagaaacccggactctactaaaaataaaataaaaaataagcaataaaataataaaataaaaaattagctgggcatggtggcaggcacctgtaatcccagctactcaggaggctgagacaggagaattgcttgaagccaggaggcggaggttgcgttgagccaagatcgtgccattgcgttccaatctgggtaacaagagtgaaactccatctcaaaaaaaaaaaaaaaggaaaaaggaaaaaggcaatataaataatatacactagtgtagtggatctcaaagtagtgtggtccctgggacagcagcatcagcattacctgggaacttacacattctggctcccaacccatacctgcaaaattaaaagctctaggggtaggcccagcagtctgttttaatataccttccatttagttctgatgcacacttaagtttgggaactactgactagtaaatttcaactttgccctgtcctggcacacctgaggattctgatacactccctgcagctccagtgacttactgtggcagcgattctccacccaggttggggttagggaaggtcattcctcgcttattaagaatgattggaataaatgctgaaatctgaacagacaaactaaaatatacacacatacactgtggaaggaaagatattacaaatattaagtctaaatctctaggaggtgggattctaagtgatataatctggggaaaaagtgttttttaaaaacataattatgaaacaatttacatacattttccagatacatagatagcacaaggcaacagaatgattttaattcattttcttttaggtggaacgaggaagccccaagagctgtttcttatttttggggtctgtactctgtgaagtcaactgggttagtgtgctctctgatgcctggaattccagtccccacccagaaacccgcagcatgattgtctgcctccttttcatgatgattttattggcaaaggaagttcaactggtagaccaaacagtaagtttgggaagcttatggcaaaaattcggcaaggctgcttagatctttgctttctactaggtcgtagtttttcatttgtttttccagtgcccctatcagtgtgaacagatgcttggcatatgagatgtacctttaaccagatgcctgattttcttggatagctcattatctgattctaaattatgcaaagaaccacactgagttagaatgtattaatcaactttattttgtatctcattaatatctacttcaatctcttgtatgcttcttgaagtcaattttggcatgtcccaccagaacagggagttcttttgaaagaaaagaacctgggttccagatactcaatacatcttaatatgaatgtgtttttgccaaaagtttggttattgctttcactagtactcctaactcgagtagatacttacttgatatcataactgttctgtgcttaccataggccatcttagtagttattccacagactagttagcaacacatatttctggaaaaattggggctctggaactaaaggaatatgtgttttatttttaggattcacctttacttagtctccttggacagacaagctcactttcatggcatcttgtggatattgtgtcgtaccagagtgtgctaagttatttcagcagccattacccgccgtccatcatcctggcaaaagaatcttatgctgaattaatcatgaagctcctaaaagtgtctgcgggcctttctattcctactgacagccagaagcatcttgtaagttgagaggtagtttaaaaggcagagactgttcctggagattggtagcagcataagtgctacaaaggacagtcgaagctaggaagtgctcagcagaggaagtcggaggatgtgtattatcatatactcatcttttggccttgtagatcttttgggttgagttctccctttgggtgaacttttacttactagcaatgtcacatgtcgatgaaaggtcaaaaggattgagggctgccagcaagctgctggtttcatgatctgaatgtcattggcagcagaatagcagggaggaagggaggttggtaatatgaacttaggcttgacagggcaagtccctcagttttctcatctgattagaaatagtaccttgcaaaggctgggtgcggtggctcacgcctgtaatcccagcactttaggaggccaaggtgggcggatcacctgaggtcaggagttcgagaccagcctggccaacatggtgaaagcccatctctactaaaaatacaaaaattagccggggaatggtggcaggtgcctgtattcccagctactcgggagactgaggtaggagaatcgcttgaacccaggagggaggagggttgcagtgaggccgagatcgcaccactgcaactccagcctgggcaacagagtgagactccctttccaaaaaaaaaaaaaagaaatagtaccttgtctcaaagtggtgttttgaggattgaattcgataatgaacataaaagtttttggaaaagtttctggcaagtagttagtgtttggttaatgttgttattcttgtagtaaaaaaggaagagtattctgccacaatttgggaaaacatgggccctggtcaaagtgttaccatagatttgcctttcactaggccccttgggccacgtgggactaagtcttcatgtggcttcctgttctgtcccctctactccctacccaagcattcattgcagtgccatgctcccaggaaatatgcagttaacactccttgcttggattcatttgaatgatttttttttttttttttggtcaggatgcagttccaaaatgccaagcttttactcatcagatggttcaattctcctcagcaccctggaacaaaatggaaaaatcaccttagcagtcctagaacaggaaatgtctaagctcttagacgatatcattgtctttaacccgcccggtaagtgaccagtcggaagtcctgtattcattcagtcaatgcattcctgctgtgcgtaaggcactgtgagatcaggaggatgttcaggacactggcactcctctttccagagaagcaatggtcagagaggtgtttggacaccagggactcagcagtggggaaggattgacactggcagatgctgttgggtggtgggcgagactgacctttaagctggacaatgggatctaatgattaggagatatcagagacctttcagtgagcggcatttctagggattttggcttttaactgggagggcacttcagaatcacctgtagacttgtcaagaaactgtgtctggagaaccttctgctcccagcagtttggtggactagacatactgcctgcctctcctgctgaagataactgggtgctggatgaaatatttttaagaaactggaaattaaatttattagtggagtggcaaaaaggtaagggaacctcagaggccagaacctaagtgaaaggagaaacccataaaggtaggtggagttctgaggctgctgtcaccctgaagagttttgctgaatatgtttggatattagggggaggtggtaaagcccagggcctgcctaagatgggagcctaaaaggaaatccgatgcataatccacagggtgacatttttactgtaaagataagctagaagtaaacctcctcttgtgagaggaaggcaaagacagttacctgttttggcctcgttgttaggttaaatgtttatgcaggaaaagagatatctgttttgagaattgataacaagctgaccctcatgtggttttgaagcaagaattcagactacctagattggtagaaacagcagtaataacaacaacctcaatctaagaatttagagtagttctgggttggcggtgccaccagcatctggcaaaaagcaaccatagctcctgtttggagaaacgcatctttaactcatgcctcaaagttccaagaaactcacagtaaaaaaagtcacaaaacacaggaaacaaggtaccatgagcaaagtaatagaaaacaacagcagcgtcagaaatgaaaagattgaagatagtggaataattagtacagtaagcaaaaaagttatttttattatatgctgaaataagagaggattgaagatatcagtaagaagcaagggattgtagaaatatgcagatttgagagatttatataatttagaaatgaaaaatataaagattataataaagttaatggataagttcaacagattaaacccatccgaagagaaaattggtaaactggaaaacaaaactgaagaaaatactcagattgcagcacagaggaacagagaaggaacgtaaaagtgagctgggcatggaggcggaggcaggaggattgctgatggccaggagttcgaggccacagtgtgcaatgattgtgtctgaatagccactgcactccagtctgggcaaaatagtgagaccccatctctaaaataaaaagaatacgaaagtgaggttaaaaggcatagaggataggctgagaaggtttaatatacatcctattatccaagtagaattccagaaggagaggagatacttaactggggagaagcaatatctgaagagatagcaaggctgaaaattttcagggctgatgaagacagcaatcctcaaattcagtaaacccagcaaatcccaagtaggatatatggaaagaaattcaaacctgtatacactatagtgaacctgcagaagtaccagtggcaaaattaaaaaacaaaacaaaacaaaaccctttacatccaggaaggaaaggcagattacctaccaaggagcaacatttagactgacagctgacttctcagtatcaataaaagaatctgtaagacagtgggataacaacttcaatgtgctatgagaaaatgactcataacctagaattgtaaactaagaaaagccaccctttaatgatgaagacgaggtaaagaaccatactttcattgagccctgagagtgtttgtcccagtaggtgtcactaaagaaaatactaaagcatgctaggaaggaggttgagttaaaagtgttctaaggttctactgctgtttagtggtcaagagattaactttataccttgattaaagtatgaatattaacaattttaagaaattaaccaaaagaatagaaattaaaatgtacaatttccaagtcagtagagggagataaaaaggaatgtccaaagtatgttcagtccaaagaaggcaagaaaggaagcatggagaaagtgagaaaaataaccaaaataagatgataaaattcaaatgtattggtaaagggactaatgcttaagttaaaagacaagattgttaaggtaggttaataaccaaaaacatctagctttaagctgttgataagaaatacatcaaaagcctaaggatatagaaagctttccacaagatgattatgtcaggcaaatattaaaatagaaagctggcatagctatattaatatcagataaatagatctgtaaggcagaaaactttgtaaaagccagatgttcatctctgtgtatttctgccccgaagttgcatgacaaagaaaaaaaaatcagtaactaaatagaactagagggaaaaacactgtggaaattaagaagcaaacttttaaataactgatggccaaaggaataatcataatagaaatttaaaatacttacaactgaataataaaatacagtgcatcaaaatttgtgggatgcagctaacatgggacttattattttagcctgttctcacactgctataaagaaaaacccaacactgggtgatttataaggaaaacaggtttaattggcttatggttctggaggctgtacaggaagcatggtgctgccatctgctcggcctctggagaggcctaaggaagcttacaatcacggcagaacgcagagtgagagtaacactccacatggccagagaaggagcaagagagagaatgagcaagggggagatgttgcacacttttaaactacgacatctctgagaactctagtatgagaacagcaccaagaggatggtgctaaaccattcatgaaggacctacccccatattcagccacctcacactaaactctgctccaacattggggactacggttcaacatgagatttggtggggacacagatccaaaccgtatcacttactttcagggccttaagtgctcatcatagacttttttaaaaggtgaaaattaaaaagataagcattaaacagttatttaaaaagacggcaaaattacagtcaaagacagtagaggggaggaaataataaagagaaaataaataggaagaaactaagaatgaagaacaatgaaactggtaaatgtgtgggtaaatctaaatgaaatctgactgtataagacaataataatagaaatggtttgttgggctatggcaacagtggagaaatgaagttagaatgttccaaagccattacatcatctgggaaccaattaacattagacttcaaaaaatcaggaatgcatgttttcatttataggataaccactgtcagaattttaagagaggatttagttttcaagctaaaacagggaaaaagtagaataatgatctaaaagaagcaaaagagagaaaaagaaatgtagaataggagggacaaataggatacatataggaagacagtagatttagacccagctacatcagtaattaattataataactgtgaatgactaagattgtcataccagataaaacaaggaagaaaaagacaacttagtagaaaaaaatggacaagacccttgaaacgacattctgcaaaagaaaatatactgatcaccaataaacatgaaacggtgctaaatgttgttaatggtcatacctgtttcatgtagatattgtaagtattgagtgagataatatctaaaattttagcatcagcctggcaagtcagccacattcaataaatcttatggaaaaaaactatcagcaagcaatgctggagaaactgttctagagttggtcagatatgattgaaccaggaaggttgaataatagctggccagggaaaggagagaagggtgttctggaaagatcttcatcggaagagtgataggatcagatatggtatttaggaaaagatttgagagccctgttgatatgaacaggaatgggagagactagggtctgttgtagtaatctattcctattagtcataattaagagataaaatttaaattgctattccgttgaaattcagagatgagcctttatttccaagaatatttgtacccatagaaatacatgaagaaatagacagatatactgttactatctctctcaaacttgttttttaagtccttgcttgatagtaagtaggtcgtacagaaagattaagtgagggtttatttaaccctgcataagtagatgaatttgttttgatagatgcgatgagtaagatctctcaactttttacccttcctattgacataaatactgaatccttgtggtgtgaaagctacagcttgaggagagctagaagagttggcaaaaattattccatttaactctcagtaaaatatattttctgtttttgaatgtgaagatttgcagttctcttgtaaaatgaattcgttctttttcttgaattcctctctctttacctccaattttttttgaaaaattaccagttggtttactttccttatttaaaaaacaaagaaataaaagagctgctgttaggacactttacaaaggtttttccttacatttatatttagttttaagtaataacctttaatgtgtgtaaatcaccctagaatattgacagcggtggcagtgacagtgggtacttttgctacttggtttactgaatgactggtgagatctacgtatttggttttccatgagcaaaggttggaaaataaagactgactaggcatgttctgataagttactctttcacaccagcttcagatttgtctatttattaagtattgctctgctatgctgctgtacccagggaactcacagtagttcctgcttttactcttagtaaccgtgtgccgcatactacctgtacaaacttaacaccatccagagccttccttccagtcccttgcagtcagctactagcactgtaaaatctgcctggagaacagctaagattgaagcactgttattctcctgatcacatggatagtacctttctggcagccattcttgagtgtgtctatattcctttcagacatggacagccagacccgccacatggccctcagcagcctctttatggaagtcctgatgatgatgaacaacgcgactattccaacagcagagttccttcggggcagtatccggacctggattggccaaaaaatgcatgggctggtggtgctgccccttttaacagcagcctgccagagcctggcgtccgtccgccacatggctgagactacagaagcctgcatcactgcctacttcaaagaaagtaagaggaggtcatcttacgctccattgtattggtcttttccagaaagatgaaagcattgtcatcagcagatatgtttccagactcttcccagtgagggatttgccattctaattttctgctctacaaatgttgtggatgtttctgaatatacgtatttttcataaagatctgcagttagcatgagaacctgtggccatgtctgttggtacaatcacatttcaagggagaaaagctctaatccacttcacgttagttttggagggtcagaccaacctgttatgatatgcaaattgtgttgtgtcacaggccaagtcatagtcctcagaacaaatgctatataccaggatctatataatcatagtccatgaggttaattttccctgtttttgtcacttttggtaaaaggagttttcatagaagtttttaaaattgctgcttatcagaccttttaaagcattatgaagggctcattcattgtcacccctcctttttaaaaatctgttttactttctacctctaaactgtcagactctggaagcggcttagtctgattaagaattgctgagaacagcacttctcaactctgatatccagataacacatcacactgcagtcagtgggagagaagcagtagtgagaaggagggtatcggagcaaggatccaggaagtgcccacaacctgccatctgccctgtcctgaccacccatgaacagcacatgcccacccatggaggtggtgtgcatgtcaccatgccaccccaccctcgctcccccaaagagtggagaaccattaggataacactgctattccaaactcatgtgtgttactaaaaatcaaacagtttcaatacatgagttaaactaagctttgataagtaaaactactcacagattgagtgataacagtttcccgtcggaaagcataagtgttcatatgttcttaaaaagggtattaaagttaaaattcttaactgaccaggacaggcagtgtctacatgtggttttaaggatcataatgtgatagaaaggtgatttatacgtatgcagccctgaattctgatttcttaaacctttctggtggctacgctggggacaggcatctggcctgagggctatccagtctgagccctgaggtatatttgacttttgtagcctccaaggtcactgtaagaaaggttgtcttgacatgaagcttattatctcataggttgctatgtcaaaaaaaaaaatcatgaagcttaaagtgaaaatatttgctagagttgtcaagtaattggattcttgcctatatcttgatgtctcttcttcatgttcttaggccctctcaatcagaattcaggatggggacccattctggtatcccttcaggttcccgagctcaccatggaagagttcctgcaggagtgcctcaccttgggcagttacttgactctttacgtctacttgcttcagtgtttaaacagcgaacagactttaaggaatgaaatgaaagtgctgctcatcttaagcaagtggctggaacaggtgtacccaaggtacgttggccctcaggctgttacatcaaacttgctgtatttggttaacttggaatttagagcttaagtctagctttaagtacacagaaccaagaggtgcataaaaaataaggttttaaggtatggtgacagttgttttggaaagattcttaattaataggctaatcttctgagcagattttttgtttcctaaaactggcactttgaaacaccaagcatcagtttccttaccagttaagtggagatagtaatccctacctgatagggctgtcatgaggatgaagtggaagaacacgaagttcatcacagtggcgtgtagtaggtgttccacagatggcggtggttacaatcccatggctctattaacatcagccgttagcctgtgcttttgaagtactgaatgtctcctatccttcaaactctgatgtggacttgcagttaaatgggagtgggaaaaatttacttctaattttattttcctccggtgcctcccctagctccgtggaggaagaggcaaagctgtttttgtggtggcaccaagtccttcagctctccctcattcagacagagcagaatgactccgtcctgacagaatctgtcattcgaattctgctcttggttcagagcaggcagaacctcgtggctgaggagagactcagctctgggatcctgggggcaattgggtttggccggaagtcgcctttgtctaacaggtaaggaagcgcctttctaacactgttgttctaaataggcctcagacatctgtacctacttacaggttgtgatatacttcagtaggtttttcgacttaggatctaggttctccagaaagattaatggaaaaaaaaaaagaaaaaaaaaacagagcctgattacatctttacattctaaaaagcatttttattttttcttacctttaaaaaaaattttcaattcaaacagtatttttaatagtatctcctgttgtgtttggactttgtaacctaactgcactactgatttctttttggttttgagctagtcatggacggtatgcgagcatagtttaaaagccaagtcagctgggcacttgaggcgttcagggaaatccagaacctgtgagggactcagtctagtgaactgtaaagtcgtcaagctgggttaagatctgttggtggccaggcgcggtggctcacacttgtaatcccagcactttgggaggccaaggcaggcagatcacttgaggtcaggagttcgagaccagcctggccaacatggtgaaaccccgtttctaccaaaaaatacagaaattagccgggcatggtgatacatgcctgtagtcccagctactctggaggctgaggtgggagaatcgcttgaacccgggagacagaggtttcagtgagctgaaattatgccactgcactccagcctaggtgacagagtcagaccctgtctaaaaataaataaataaataaataaataaacacaaatataaaaattagctgggtgtggtggcaagcacctgtagtcccagctactcaggaggctgaggcaggagaattgcttaaacccaggaggcagaggttgcagtcagccgagatcacaccattgcactccagcctggccaacagagcaagactctgtctcaaaaaaacagaaaaaatgaataaaaggcctgttggtaagaaggataagtaatgagaagcaagtctggatttttgttgcaaaaaatcccaaggcatggaagaatttgccattagctcctgttttctctcataatacttacttacatcatggtttccttttcaagcccttgtcagtgttgaaaagagtttgcaaacttgatgatgtcagcattcttgtggaatagcccattgtgatgttgtaactttgggactcactcattccaaaccagttaacgtcatgtttttttgtttgcggtggaagatagcaggactgcgagattttgttttacttaaatttggcttgcgtcttttattctttttaattgtgataaaatacacataacttaaaactttccatggtaaccatttttatatgcacaattcagtgacatttagaacattgacaatgttgttgtagccatcaccacaatctagcttcagaacattttcatcactccaaaaggaagccctacactcattaagtagtcacctccattccctttaatccccgtgtctctagtaaccactaattgacattatgactttatgtattgaatcctattttggacatttcatataaatggaatcatataatgtgtggccccttatgttggacttttttcacttaacataaagttttcaaggttcatttatgttgtagcatgtatccatacttcgtttgtttttatggctgaataatattcctttgtattccacattttgtttatccattcattagctgatggacatttggattgtttcaaccttttggctattgcagataatgctgctatgagcatttgtataccagtttttgttagaacatctgtttttagttttttgtgtatacctaggagcagaattgctgggtcctatggtaactctatgcttcacttgttgaggaactgccaaactcttttccctagtgcctgcaccatttacattcccaccagcaatgtgcaagggttccagttactccacatctttgccaacactttcattcttgaatctgaattatacatatattgtttggatggtgataatggataaaacttcttcttgatcatatttaagattttcctgagaaggtgaacaacacagtagatctggaaatgtgttcatctttttatgtcatagaaaatatggtgtttatttcaaaatgcttactttaatagccatttacttcttctgacctctccctaatgcctaaggttccgagtggttgcccgaagcatggctgccttcctttcagttcaggttcctatggaagatcagatccgtttgaggcctggctctgaattacatctgacccccaaagctcagcaggtcagtatatacaatgaagggttagaagtttgcctgcacatcttccctagaaggcagggaggtggcagccgtagcctgtgcgcgtcatgacatgatgctctgtggtggtagcacagtgttccctttcatgtgccctacttacgggaaaatggtttcatgtgccaacctccaaatttttgtaggcagttgtctagatcgctgctactgtcattgtagaaaagtaaggccaaacgaaaagtctgtctagcattaaatttggttctgataagtgtgaatatgcacttatctaccacatgcttgggctggggcaggggctggagctggggactgggatctcgcacagaagatgtggctacagttgggatggatggaaattagctgagctttagcttggaaccgagaaagtagttcctgttttgtgagtctgaaggttgactattgttggctgatgctagaataacctaacatggacagaatggtagctagaaattatagcttcttctaaaaacatggaaggccacattcctataacctatggacatgctggccaggtacaaaggtgcacagtaaaaaatgatgatcagcattcgtgagtactccctctgtgccaggtactattataagttttaactcgaccaatattagtgagttaaagctttaactcatttaatcctcatagcaatgctatagcacagaaacgactttattttttaagacagggttttattctgttgcccaggcaggagtgcaatggtgtgatcatatctcactgcagccttgaactcctgtgctcaagcaatcctcccacctcagcctcccaagtagttaggactacaggcatgcattgccactcctggctaattaaaaattttttttgtagagactgggtctcgctttgttgctgaggttggtctcaaactcctggcttcaagcgttcctcttagcctcagcctcccaagtgttggtattacaggcatgagccactgcatccagctgggaactattattatcctggttttttggatgaggaaagagagagagagagagaaaggctaagtaatttgtcccaaattacacacctagtaagtgttggggctggaagtcgcactggccagtctggctccaggcctctcccattccctgctctgcagggctgtctctgtaagtgctcagagcttgaacaccttagctcctctgctggggcaactttgtcatgtctaagccagccacatgcaatgtcagatcttggttattaagagcaaggatcagacagaataattagcagattagcaggttctccacagggatctgggcttataaaatagctgatagttgtcactcattgcctagacagctgctgtttgaatcccctattgtcttacatgaaacatcccagtgggcagatgaatatcctgagggcaggttgtgaagtcagtgagatgcagggtgtatttgagaagactacgtctcctgtggccaccagtacctgcagcatcagtttcttgctttagctggggccctgggctgcccaggcctggcctctttgccttcatttctttggacttaaagtgatgactccctgtatgtcccatacatacttgtcatcaggattttcagatttgaagaaagttgtctttttagaaaatgattatcgttaggcaaactgtcaaagtagactgtttgggggactaaatttaaagaaggaaaagagagggagagagacagagggacactgtgattcatgggaatgcctgtcccagttgattcctattcttaaattgaactctgtttacatagctcttaatttggtacccagataccttcagtttattttcagcccaaagacttccatctacagccctcctggtagttaatttctaaaattctggtttatttatcatcctcaaaaaaatcccctctcttatggtttttgaatcaagcacattccatcttttaatacatattttctagtgcagtggtttctgtaaaagggacaaggagggagtggggcactccatggtgggggatgtgccccagtgaggaggggaacaccgtcagaatcctggggtggatgagcttgttaagttggaaaacaaaactcctcaccccaaaaatcaagagccattgttgattttttgttttctccatatacagtctcttccccttctcttctcctactatgaagaaaggaataatcaaaattctggagtcaaagaatgcttttctttccttcctctgaagagaggcatggaaacagtttctgccatgattttgtgtcatttgtcagatggattcgggaggaacctatgtacttcatgcttgttggctgatttaacaaccttctcacttactcttggcagcacttagcaactggttcctctagaattcctttccgttagacagtttcatataacattatctcataacctaggaacatacccaacagcagattgaacagatttcaccttagcaagatgaggctggtgcctgggatttccggttgcgccctagaacggaaggagtggacaatctggtggggaggaccccacaggtgggactggggagaacgaggacaaggcaggctttagaaatcggtgtggcaggtgaggcgcccagcaacaagagcagcctgccacagcagtggctcttggtaaggcaaggttgggaaatggcacagaacagaaacagggaaggctgggtgtgggatgctgcaaaggccacagaggcttgggctgctggcctccttctggttgtggttaagttaatcaatgcctgccttccggactcctggcctcagttctgtaggcctccttcccacaaggctcacagttgaagtacacagtgataatgggtgtgctgtacctctggcagtcacattatgtgcctctatggagttaaccctctcatcttccgtgtcttttaggctctgaatgctcttgaatccatggcatcaagtaagcagtatgttgaataccaggatcaaatattgcaagccacccaatttataaggcatcctggccattgccttcaagatgggaaaagcttcttggctcttctcgttaactgtctgtatccagaagtgcattatttggaccacatacgatagttaacactgaggctcttgaaaaacccattgctgtttatgtttacatttaactttgctgttgcacaagtaactttgctcaattgcactgtagagctcagtttggccaatgtgtagttgactgagatgcaagttgggaggcgttagatattagataattttggggtgtgtgtgtgtgtgtgtgtgtgttttcttagctcttaagaccttctggggactctttaagtttttatatttatccacaagagaaacttactaagttccacttgggtgcagagccactcacagttgccgaatgtcccagtcatctcacaagacctccagatggagttctttgtatgtttccacttctgtctctgttttatgtaaatgttccagatctgacaaccttggaagtcactcagtacccttacttttaaaccccatttgtgttcctccaaagtaaagaagtcaattttgaaaaatttctgcatttctcaaatgtggacaaatacaatagttttaaagtattgtttttctcagaagggagataaaaatgccgagttagttaaagtgggtcatgtgtaaaatacgaccacttgatcgtgattatagtgggcagtagagatgatgacaagtcaatttccatccagccgtgtatcctcatggagaagctgcctgtctgaatcaggatggcaagctggcagtctgggaggagcatgttttgcacagatgttttgtttggtccacttggtgaggagtgcagacagggctgcctctctctagtcgggagagtctgtgcattccctcgggccctgaccctagcctcattcacatcacttgcccctgtcgacacctaagtttgcaccctttgatagacaccatgttcgatatctgaaaggctcagtgtcaggagacagagactgagggagactgaagacctgattctctgttccctgcttgttttttaacttcaaactcagatgaagccaatggacctgctgaaacacttgtctgtggaaactgggtcaggtcgggagatctactgaaatttggctttttttccatagccacgtgccttctgttgttgacagttcattcattaccaaagcctgtgtgtaactttgccttgttctgtggccatcttcttgctcatgttatttctcctgggaatgagcagtttgacttctgttcccacgttcctcattctatcagctctagatggattttgcctgcatagctggcttaatatgtctttgtgtatgggtagtctgtagcctgagaatatttacctaaaaatgtctaaacagccaccaagaatgtttataggggtataggaatatagttaacagagtgctaatctctcctcaaatgtccttttggaatgcttcccccaaaattgggaagttggtaggagcttttctttactttgaatttctttacttggacagaacgattctgccttaaagacacgctttgcagctctgataaagaacatccctgtttagtctcttgagttttacaggccacaaaatgtccgtctcagagggatctgtctcagcttttcttatttttgcttctctccgttttcaaaattaatcatcttgttctctgtataagaaaatttgagaagctgtggacaatttaatagtctgatctggcaacagcgatttttgtttggaaatattttgtgttttctttgaggaggatataattactgatatcctaggatgtgaaatttttgagtgacgtatgcacttttaaagaaaattatgattaatctgtataatgttttttggtctgtaaaaattataaaaaataaaatcatttatctttggttgtaactgtttaaaaaccaaattatagggatatcacactatcttgtaaagtgtttcagctgttaaagttgctgtaggtttttatgcctgatgtcatttaatttatttgacattgaacttcattaataatcagagatggtcagtgaaagcgc

SEQ ID NO: 2865 - DNA, 1749 bp, Homo sapiens
ggcagagagaccagcccgcctgttggcttgcaggggtaatgagccttggcttgaaaaaattgttggcctccagagagcacggggctgtggtttcagaatcagtgatgggtgccgcacatcaagacgggaatcaagcaagaccaaggccctgtggactgagcagcgtggagggcgaacggctgcaggctccagacttcaccacagggtggccaacagtggcatcgggaccaaataaagatgtctaacagcttcctgggagcaggaggaggcaggattctggttgccatgaaaaacatctctctccctctccatcactccccatgctgcagtgcacaggtgggttgcagaggcaggctgcatcccggaatcatgttgtcccactgcctattaatagaacaagtgaagggcagaatgctggaacacaccagacatagagggagggaggtcctgccagatgtgtctacacaactgtctacatagcatgacagtagcagtggattcgggacccacctgtacatgtttccaaagctccttcctgcacactcgggacctcagctccaaggcgtgactcatttctcagtctcaccatcctttgttggctcagacatcgcatgcctctgccccactggggttgtgtgcctgcgtctctcacttctttgaggttggggaaagcctagtccagaaaatgaaaacccatagaccagcctaacttcctttcaaccaagtgacggcctcctggttcctctcagttcatcatcaaaatcagtgtgtacatgtcatacaagccaagagtgttcatgtcctcgttcctttcaaatgaaggtgatatatactttttcactgagtttttattcctgaaattctttcttctggagcaggaagcaaatgtcctggaatcgtagacttttacagtcagaagggtcattcacgttcatctagtgcccctctcactctgcagggatcctcctgcctctcctctgcccctgtccagtgcctggtggtccagcctgtgatgggcaggcctaggctgccatccgcaggctctgtagttctgctttctattgaaccaagatgtttctacgttgcctattggtcgtggttctgtccagagcagttcaggctggggctgttcacttgcccctccttgaggcagacctttagatattttcagttttcatcacatgtctaacaccacttccaccccacccctcacctcttaggctaaatccaagctaaatcccccaatgtcttttttttttttttttttttgagacgagtctcatctgtcacccaggctggagtgcaatggcatggtctcggctcactgcaacctccgcctcctgggttcaagctattctgcctcagcctcccaaggagccaggactacaggtgcatgccaccacgcccggctaatttttgtattttttagtagagacagggtttcacccagccattgagacaagctggtttcaaactcctgaccttgtggtccgcccgccccggcctcccagagtgctgggattacaggcgtgagccaccgcgcccatctcccctgcaatgtctttagttagaccttttccaccatcatgtctaactgggctacggtttggggaaagtgtccaaattagtccgtgttatcctaaaaggggtgtgccccggattagcagggccagggctagggtgagacaaatgaggcacctggggcatacatttaagttggtgcttgcttgcaggtgccaagagagtgct

SEQ ID NO: 2866 - DNA, 1748 bp, Homo sapiens
ggcagagagaccagcccgcctgttggcttgcaggggtaatgagccttggcttgaaaaaattgttggcctccagagagcacggggctgtggtttcagaatcagtgatgggtgccgcacatcaagacgggaatcaagcaagaccaaggccctgtggactgagcagcgtggagggcgaacggctgcaggctccagacttcaccacagggtggccaacagtggcatcgggaccaaataaagatgtctaacagcttcctgggagcaggaggaggcaggattctggttgccatgaaaaacatctctctccctctccatcactccccatgctgcagtgcacaggtgggttgcagaggcaggctgcatcccggaatcatgttgtcccactgcctattaatagaacaagtgaagggcagaatgctggaacacaccagacatagagggagggaggtcctgccagatgtgtctacacaactgtctacatagcatgacagtagcagtggattcgggacccacctgtacatgtttccaaagctccttcctgcacactcgggacctcagctccaaggcgtgactcatttctcagtctcaccatcctttgttggctcagacatcgcatgcctctgccccactggggttgtgtgcctgcgtctctcacttctttgaggttggggaaagcctagtccagaaaatgaaaacccatagaccagcctaacttcctttcaaccaagtgacggcctcctggttcctctcagttcatcatcaaaatcagtgtgtacatgtcatacaagccaagagtgttcatgtcctcgttcctttcaaatgaaggtgatatatactttttcactgagtttttattcctgaaattctttcttctggagcaggaagcaaatgtcctggaatcgtagacttttacagtcagaagggtcattcacgttcatctagtgcccctctcactctgcagggatcctcctgcctctcctctgcccctgtccagtgcctggtggtccagcctgtgatgggcaggcctaggctgccatccgcaggctctgtagttctgctttctattgaaccaagatgtttctacgttgcctattggtcgtggttctgtccagagcagttcaggctggggctgttcacttgcccctccttgaggcagacctttagatattttcagttttcatcacatgtctaacaccacttccaccccacccctcacctcttaggctaaatccaagctaaatcccccaatgtctttttttttttttttttttgagacgagtctcatctgtcacccaggctggagtgcaatggcatggtctcggctcactgcaacctccgcctcctgggttcaagctattctgcctcagcctcccaaggagccaggactacaggtgcatgccaccacgcccggctaatttttgtattttttagtagagacagggtttcacccagccattgagacaagctggtttcaaactcctgaccttgtggtccgcccgccccggcctcccagagtgctgggattacaggcgtgagccaccgcgcccatctcccctgcaatgtctttagttagaccttttccaccatcatgtctaactgggctacggtttggggaaagtgtccaaattagtccgtgttatcctaaaaggggtgtgccccggattagcagggccagggctagggtgagacaaatgaggcacctggggcatacatttaagttggtgcttgcttgcaggtgccaagagagtgct

SEQ ID NO: 2867 - DNA, 7213 bp, Homo sapiens
ctgccgcggctttgcggggacgggggagtggtagtgggggctgcagctgccggacccaggtgcggaagtgcgagggcccaggtggctgaaggggccgttaggaacatccaagcggtggggcacaggcagatccccgacctgacctggaccacccttctcctcttggcccgccccttcaactcgcctccgcttaggtctggattggccccgccccctgacctgagcctggtccttcttcaggcactgacccttgacctccggtggctcccccatctctcaggcgcgatggctacgggcgcggatgtacgggacattctagaactcgggggtccagaaggggatgcagcctctgggaccatcagcaagaaggacattatcaacccggacaaggtagcaggggcacctgaaagcgttgactaggggagggtaggggagtgaagatggggaggagtgacaacgggcaagggatgggtgctacacttacagtgagttgggcgataaaaggggtgacataacaggacagggaatatgtgtcatccttgatgggagggaggagatgggacatcgtgggagatggtgggaccaagagggtatgacacctctaagagctgagaggaccaggcaagtgtgatttttgcaagatattgttggggagagatcaagacattgtaacagtctgagagttggtgggatggggaggggactgctctgatttgggcgtaggatggtgttcctgggagtgggtttctgtgcctttacagtgtgtcagtttgcctgtcattgaccctgtaggtgctgctttgttcagggattgagctggactaaagaattttcaggaaagggtctaggttgtggttcctttctgtggtttccttcctcagaaaaaatccaagaagtcctctgagacactgactttcaagaggcccgagggcatgcaccgggaagtctatgccttgctctactctgacaagaagcaagtattggagtcccaagtcccccaggttttggcccctgattcacctgccatgcccctaactcctagttttctctaacaattttctcctccccagcaagggctcctgcttgcttagcaggatgcaggaggacctgaagtcttttgctccaggacatgactttcttgctatagggtagggtagatcagctccctgggacaaaaagctctttaacacaccttctgattctaacctcgcatctccctaaacctccctgccagggatgcacccccactgctacccagtgacactggccagggataccgtacagtgaaggccaagttgggctccaagaaggtgcggccttggaagtggatgccattcaccaacccggcccgcaaggacggagcaatgttcttccactggcgacgtgcagcggaggagggcaaggactacccctttgccaggttcaataaggtaagctaccttcattcggacacaggccaagattgccctcccactttgagccatttgtgcgagctctccagtctcctagggttggttctgggggcacgcttatgcccaactgtgattacccactcaatcctcgtggcaaatgcatgcagagtaggactctgtgggtcttttctgcccaagggatcctgttctttcccggacctgctctggtttttcatggcttttcttggtctttcaaatgttgctgttcctcagagctgtatcctaggtgctctagtcttcttgttctctactttcttagtatgaaccctgtggcttcagttaccctctctacaagtcaccaatccagagcagtgcttccttcgcatccagtcatttactaatatctctttctcaatgccccacaggtaccttacatcaggtaggtaccctgaacagagctcatcatcttccctctgtcagtcccaaatctgttccccatctcagtgaatggcactatcttccacccagttgcccaaaccagaaacttgggggatcgtccttgacttagtcttctcccttagtcctcacagtatttaaatcaacaacagaacaaagaaggtaggggaaaacaaacaacaaacatgtaaggaaataaattggagtctttcaaataagagccgtcagtaacacgaaaccaggatttgaatggatatgaaatgagataaagagtgaacttgtaggtgtaggggagtcctaccttaggttggtcagggagggtctgagaacgtggcatttgagctggatgccagtgatacatctatttattgagtcctgttgattctttttccataataaatcacatctctgactatattcttcatcactatgccagccccctagtccaagctgagttacctgtgtagctcagcacagcacggccttcccagactcacccattcagtgagaggcagagctagattgggctaggtttcctagtccattacttaagtcattgtacagtgtggcctcacagctgctgcggcctggaatagcctagacttagatcctaaaagcctcatttacctcttctctaaccaatctttgtccctgggctggagtgtcacttgttataccctatgtatcaaacttcccacacggtaccaaaattgttttttcagctgcagtatgagctttgagaggctaggatccctgcctgtcatatgcagcactgtgtctccagcataggtattgcagccccatggtaaatatttgttgaatgaatgaaaaaatgtcttcctcacttgactatgagctacttgagaggactggctgcacagttcctgaggattttttttttttccttctttgagacagggtctctttctgtctgccaggctggagtgcagtggtgtgatctcagctcattgcatcctccacctctagggctcaagcgatcctcccacctcaccctcctgagtagctgggaccaccggcatgcaccaacatgcctggctaatttttgtgtttttttaagagactgggtttcaccatgtttcccaggctggtctcaaactcttaggctcaagtgatctgcccacctcagcctcccaaagtattgggattacaggcgtgagccaccgcacatggccctgagttgttggtttgtttgttttttagttaaattgaattaaaatgcataggagaaatatgtaaccaaacctgggaaaccagagagacttcccagaggagatgatgcctgagagctcgaaaggttgagaaagttacctaggtagaaggaatgtggaagtggaaggcatttcaggcaagagcagaggtcaagggggaagtctgctatgttctagaaactgctagtcatttggctgcagtttagggttcatgagggacagtggctgcaggaggaggccaggtcatttatttgtatgttcattaattgatttggtagacactgatacatacagtgtgctgagtcctaaaggtgcgagatgaactggacaacccttgctcttcaggagtttgtgaattatctagaagatgctttatcttagatggagagcttctgaggagtttaataagggatagttgggggtaatgataagatatatattctagaacactaggacagtgtgtctcaaatcatctgtggtgaaggacatttttctattttatttctaaaccatcagagactgataaagataataaaattataaagacaaaatacaagtccatgtttcttcatattagattcaacagcatacaattgctgtaaaattgttacgtaagtttttcagtgtgtactctcagtttccattctcatcatagaccaggggtaagtgtaaacagcactggtttgcagactatcctttaagtagcactgttcaaagagatcacgtcttagctgcagatggagaattgattggaagcggattgaatgtgggcagagatcagtagcgaggctatttctctgatccaggcatgtgacagtgggtaggccgacggagaagtggcaatggagacagaaattttggaggtaaaagccacagatttggtgaaggggaggagtcaaggggaaagataggaattaagatgcctcccaggtttctggcttgagcagctgggttgggtgatggtgatattgactgaaatctggactggagaagataatgtttgagagagggccatgagttcagtactgagctaagtttgaggttccttggggcctccagtaggagatgtccaaaaggcgaccagttttggagctggttgtggtctttaactgagaagagagacttccctgatgtagtctagcactgactccttccttgggtctctgacagactcagctcgtggtagtgctatttgtctctgggggaggtctgtggaagaagggaggaaggggcattggcagggctgcgtatgttggtagtaggattcaggcccagcttctgtagagatgcctgaccttggcaaactctgggggagtggcaagtcccactgtgcccactgggtggcagtagtgcttcagatgagttgtatggactaggggttgctgggcctttctccaggtaattagccatctgtcctactccagagttgacctttggactccacagaagcacttacatgtgggcccctcaccttaactatgggggcaggagtgtgtgtcccatgactgaggctctggagctggagacagtgaagttgatcctggaataaatcagaggcaggctacagtcccaaaccctgctaggacctctagtcaagcagacaagttctttcctcactccatgctgcaggggcacaggcccagggtctggcaacaaacaggagcagctgtggtcactggggcctggagcctgctggacatgacatcatgcgggcatgcccctactgtgtccctctgtgctagtagactgtgcaggtgcctgtgtactcggagcaggagtaccagctttatctccacgatgatgcttggactaaggcagaaactgaccacctctttgacctcagccgccgctttgacctgcgttttgttgttatccatgaccggtatgaccaccagcagttcaaggtgagccattgtgtatttgcatgggtgcccagcttctgggtctagcaggccctacttttatgccatctcttccacatgcccctgaatgttcattcctctaccctgtcttgctcctcagaagcgttctgtggaagacctgaaggagcggtactaccacatctgtgctaagcttgccaacgtgcgggctgtgccaggcacagaccttaagataccagtatttgatgctgggcacgaacgacggcggaaggaacagcttgagcgtctctacaaccggaccccagagcaggtaagcccaaggccacatacctgtcctccatgccccaaaccccttgctcattgtctccatcctccatcccctcaactcccactcccaggtccccctgcctcccactgataccttattaactgccccaagcccattcctacttctcatgggccatcccccctgcttttcatagcccttcacctccctcatgatccattacttctcagattccctcacagacagcccagcaccctgtcacctccgtgtctaccctcactcctagaagtgccctcacacacttcgcatccctcactttcccaggtggcagaggaggagtacctgctacaggagctgcgcaagattgaggcccggaagaaggagcgggagaaacgcagccaggacctgcagaagctgatcacagcggcagacaccactgcagagcagcggcgcacggaacgcaaggcccccaaaaagaagctaccccagaaaaaggaggctgagaagccggtgcggaggttccgccagcctagctcagggtggaagggtcacctggcacaaggcctcaccccgagtggagggttctgagagtacccagtgctgatggggtgctaggactaaccctgggccctctccctgtgacaccttggtctccataatgccttctcccccaggctgttcctgagactgcaggcatcaagtttccagacttcaagtctgcaggtgtcacgctgcggagccaacgggtacgtgagtcacctcctttagcaagtttgggtcctgggctctgctctgggctccatgtgtcccaaacgctgcaggcaggtggggatggagcagtaggagagattgctgcagacagaggtggccttggcaggatctcagtgatgtggccaggctaaggtcatagcagctttcactatattcagcttcctggctatttccttttctggcccatagttaacctccatgtgttaccgtctctcttccaccatctttccctctgccttttgtccccttcatcctaagcctcttgtggctgggacaggcttagcttgccagctttcattgcagatgaagctgccaagctctgtgggacagaagaagatcaaggccctggaacagatgctgctggagcttggtgtgggtgagtgtggggactgggccccatagggtgtacccacccgaggctgtggatataggttgggcagggggaggggagttcacattgctggccctctaccacacctgggctctgcccgtgctgcctgccgcctgcctgcagagctgagcccgacacctacggaggagctggtgcacatgttcaatgagctgcgaagcgacctggtgctgctctacgagctcaagcaggcctgtgccaactgcgagtatgagctgcagatgctgcggcaccgtcatgaggcactggcccgggctggtgtgctagggggccctgccacaccagcatcaggcccaggcccggcctctgctgagccggcagtgactgaacccggacttggtcctgaccccaaggacaccatcattgatgtggtgggcgcacccctcacgcccaattcggtaagagtctggacaggctgggaggcacgcctgggccctgcgagtgagcacatgcacatgggtgtaggggctcctctccctctagtgcctgcagcaggaacgatcatcacttctgtgcgagtctgagactgagggtaggagtgggttgaccagtgggcgtccttgtccctgagcgtgtgaagcacatgcactaagcctgactcaggccttggggggtcactgacctcaatgccttctgtgtatcctcagagaaagcgacgggagtcggcctccagctcatcttccgtgaagaaagccaagaagccgtgagaggccccacggggtgtgggcgacgctgttatgtaaatagagctgctgagttggaccaggctg

SEQ ID NO: 2868 - DNA, 7213 bp, Homo sapiens
ctgccgcggctttgcggggacgggggagtggtagtgggggctgcagctgccggacccaggtgcggaagtgcgagggcccaggtggctgaaggggccgttaggaacatccaagcggtggggcacaggcagatccccgacctgacctggaccacccttctcctcttggcccgccccttcaactcgcctccgcttaggtctggattggccccgccccctgacctgagcctggtccttcttcaggcactgacccttgacctccggtggctcccccatctctcaggcgcgatggctacgggcgcggatgtacgggacattctagaactcgggggtccagaaggggatgcagcctctgggaccatcagcaagaaggacattatcaacccggacaaggtagcaggggcacctgaaagcgttggctaggggagggtaggggagtgaagatggggaggagtgacaacgggcaagggatgggtgctacacttacagtgagttgggcgataaaaggggtgacataacaggacagggaatatgtgtcatccttgatgggagggaggagatgggacatcgtgggagatggtgggaccaagagggtatgacacctctaagagctgagaggaccaggcaagtgtgatttttgcaagatattgttggggagagatcaagacattgtaacagtctgagagttggtgggatggggaggggactgctctgatttgggcgtaggatggtgttcctgggagtgggtttctgtgcctttacagtgtgtcagtttgcctgtcattgaccctgtaggtgctgctttgttcagggattgagctggactaaagaattttcaggaaagggtctaggttgtggttcctttctgtggtttccttcctcagaaaaaatccaagaagtcctctgagacactgactttcaagaggcccgagggcatgcaccgggaagtctatgccttgctctactctgacaagaagcaagtattggagtcccaagtcccccaggttttggcccctgattcacctgccatgcccctaactcctagttttctctaacaattttctcctccccagcaagggctcctgcttgcttagcaggatgcaggaggacctgaagtcttttgctccaggacatgactttcttgctatagggtagggtagatcagctccctgggacaaaaagctctttaacacaccttctgattctaacctcgcatctccctaaacctccctgccagggatgcacccccactgctacccagtgacactggccagggataccgtacagtgaaggccaagttgggctccaagaaggtgcggccttggaagtggatgccattcaccaacccggcccgcaaggacggagcaatgttcttccactggcgacgtgcagcggaggagggcaaggactacccctttgccaggttcaataaggtaagctaccttcattcggacacaggccaagattgccctcccactttgagccatttgtgcgagctctccagtctcctagggttggttctgggggcacgcttatgcccaactgtgattacccactcaatcctcgtggcaaatgcatgcagagtaggactctgtgggtcttttctgcccaagggatcctgttctttcccggacctgctctggtttttcatggcttttcttggtctttcaaatgttgctgttcctcagagctgtatcctaggtgctctagtcttcttgttctctactttcttagtatgaaccctgtggcttcagttaccctctctacaagtcaccaatccagagcagtgcttccttcgcatccagtcatttactaatatctctttctcaatgccccacaggtaccttacatcaggtaggtaccctgaacagagctcatcatcttccctctgtcagtcccaaatctgttccccatctcagtgaatggcactatcttccacccagttgcccaaaccagaaacttgggggatcgtccttgacttagtcttctcccttagtcctcacagtatttaaatcaacaacagaacaaagaaggtaggggaaaacaaacaacaaacacgtaaggaaataaattggagtctttcaaataagagccgtcagtaacacgaaaccaggatttgaatggatatgaaatgagataaagagtgaacttgtaggtgtaggggagtcctaccttaggttggtcagggagggtctgagaacgtggcatttgagctggatgccagtgatacatctatttattgagtcctgttgattctttttccataataaatcacatctctgactatattcttcatcactatgccagccccctagtccaagctgagttacctgtgtagctcagcagagcacggccttcccagactcacccattcagtgagaggcagagctagattgggctaggtttcctagtccattacttaagtcattgtacagtgtggcctcacagctgctgcggcctggaatagcctagacttagatcctaaaagcctcatttacctcttctctaaccaatctttgtccctgggctggagtgtcacttgttataccctatgtatcaaacttcccacacggtaccaaaattgttttttcagctgcagtatgagctttgagaggctaggatccctgcctgtcatatgcagcactgtgtctccagcataggtattgcagccccatggtaaatatttgttgaatgaatgaaaaaatgtcttcctcacttgactatgagctacttgagaggactggctgcacagttcctgaggattttttttttttccttctttgagacagggtctctttctgtctgccaggctggagtgcagtggtgtgatctcagctcattgcatcctccacctctagggctcaagcgatcctcccacctcaccctcctgagtagctgggaccaccggcatgcaccaacatgcctggctaatttttgtgttttttttagagactgggtttcaccatgtttcccaggctggtctcaaactcttaggctcaagtgatctgcccacctcagcctcccaaagtattgggattacaggcgtgagccaccgcacatggccctgagttgttggtttgtttgttttttagttaaattgaattaaaatgcataggagaaatatgtaaccaaacctgggaaaccagagagacttcccagaggagatgatgcctgagagctcgaaaggttgagaaagttacctaggtagaaggaatgtggaagtggaaggcatttcaggcaagagcagaggtcaagggggaagtctgctatgttctagaaactgctagtcatttggctgcagtttagggttcatgagggacagtggctgcaggaggaggccaggtcatttatttgtatgttcattaattgatttggtagacactgatacatacagtgtgctgagtcctaaaggtgcgagatgaactggacaacccttgctcttcaggagtttgtgaattatctagaagatgctttatcttagatggagagcttctgaggagtttaataagggatagttgggggtaatgataagatatatattctagaacactaggacagtgtgtctcaaatcatctgtggtgaaggacatttttctattttatttctaaaccatcagagactgataaagataataaaattataaagacaaaatacaagtccatgtttcttcatattagattcaacagcatacaattgctgtaaaattgttacgtaagtttttcagtgtgtactctcagtttccattctcatcatagaccaggggtaagtgtaaacagcactggtttgcagactatcctttaagtagcactgttcaaagagatcacgtcttagctgcagatggagaattgattggaagcggattgaatgtgggcagagatcagtagcgaggctatttctctgatccaggcatgtgacagtgggtaggccgacggagaagtggcaatggagacagaaattttggaggtaaaagccacagatttggtgaaggggaggagtcaaggggaaagataggaattaagatgcctcccaggtttctggcttgagcagctgggttgggtgatggtgatattgactgaaatctggactggagaagataatgtttgagagagggccatgagttcagtactgagctaagtttgaggttccttggggcctccagtaggagatgtccaaaaggcgaccagttttggagctggttgtggtctttaactgagaagagagacttccctgatgtagtctagcactgactccttccttgggtctctgacagactcagctcgtggtagtgctatttgtctctgggggaggtctgtggaagaagggaggaaggggcattggcagggctgcgtatgttggtagtaggattcaggcccagcttctgtagagatgcctgaccttggcaaactctgggggagtggcaagtcccactgtgcccactgggtggcagtagtgcttcagatgagttgtatggactaggggttgctgggcctttctccaggtaattagccatctgtcctactccagagttgacctttggactccacagaagcacttacatgtgggcccctcaccttaactatgggggcaggagtgtgtgtcccatgactgaggctctggagctggagacagtgaagttgatcctggaataaatcagaggcaggctacagtcccaaaccctgctaggacctctagtcaagcagacaagttctttcctcactccatgctgcaggggcacaggcccagggtctggcaacaaacaggagcagctgtggtcactggggcctggagcctgctggacatgacatcatgcgggcatgcccctactgtgtccctctgtgctagtagactgtgcaggtgcctgtgtactcggagcaggagtaccagctttatctccacgatgatgcttggactaaggcagaaactgaccacctctttgacctcagccgccgctttgacctgcgttttgttgttatccatgaccggtatgaccaccagcagttcaaggtgagccattgtgtatttgcatgggtgcccagcttctgggtctagcaggccctacttttatgccatctcttccacatgcccctgaatgttcattcctctaccctgtcttgctcctcagaagcgttctgtggaagacctgaaggagcggtactaccacatctgtgctaagcttgccaacgtgcgggctgtgccaggcacagaccttaagataccagtatttgatgctgggcacgaacgacggcggaaggaacagcttgagcgtctctacaaccggaccccagagcaggtaagcccaaggccacatacctgtcctccatgccccaaaccccttgctcattgtctccatcctccatcccctcaactcccactcccaggtccccctgcctcccactgataccttattaactgccccaagcccattcctacttctcatgggccatcccccctgcttttcatagcccttcacctccctcatgatccattacttctcagattccctcacagacagcccagcaccctgtcacctccgtgtctaccctcactcctagaagtgccctcacacacttcgcatccctcactttcccaggtggcagaggaggagtacctgctacaggagctgcgcaagattgaggcccggaagaaggagcgggagaaacgcagccaggacctgcagaagctgatcacagcggcagacaccactgcagagcagcggcgcacggaacgcaaggcccccaaaaagaagctaccccagaaaaaggaggctgagaagccggtgcggaggttccgccagcctagctcagggtggaagggtcacctggcacaaggcctcaccccgagtggagggttctgagagtacccagtgctgatggggtgctaggactaaccctgggccctctccctgtgacaccttggtctccataatgccttctcccccaggctgttcctgagactgcaggcatcaagtttccagacttcaagtctgcaggtgtcacgctgcggagccaacgggtacgtgagtcacctcctttagcaagtttgggtcctgggctctgctctgggctccatgtgtcccaaacgctgcaggcaggtggggatggagcagtaggagagattgctgcagacagaggtggccttggcaggatctcagtgatgtggccaggctaaggtcatagcagctttcactatattcagcttcctggctatttccttttctggcccatagttaacctccatgtgttaccgtctctcttccaccatctttccctctgccttttgtccccttcatcctaagcctcttgtggctgggacaggcttagcttgccagctttcattgcagatgaagctgccaagctctgtgggacagaagaagatcaaggccctggaacagatgctgctggagcttggtgtgggtgagtgtggggactgggccccatagggtgtacccacccgaggctgtggatataggttgggcagggggaggggagttcacattgctggccctctaccacacctgggctctgcccgtgctgcctgccgcctgcctgcagagctgagcccgacacctacggaggagctggtgcacatgttcaatgagctgcgaagcgacctggtgctgctctacgagctcaagcaggcctgtgccaactgcgagtatgagctgcagatgctgcggcaccgtcatgaggcactggcccgggctggtgtgctagggggccctgccacaccagcatcaggcccaggcccggcctctgctgagccggcagtgactgaacccggacttggtcctgaccccaaggacaccatcattgatgtggtgggcgcacccctcacgcccaattcggtaagagtctggacaggctgggaggcacgcctgggccctgcgagtgagcacatgcacatgggtgtaggggctcctctccctctagtgcctgcagcaggaacgatcatcacttctgtgcgagtctgagactgagggtaggagtgggttgaccagtgggcgtccttgtccctgagcgtgtgaagcacatgcactaagcctgactcaggccttggggggtcactgacctcaatgccttctgtgtatcctcagagaaagcgacgggagtcggcctccagctcatcttccgtgaagaaagccaagaagccgtgagaggccccacggggtgtgggcgacgctgttacgtaaatagagctgctgagttggaccaggctg

SEQ ID NO: 2869 - DNA, 572 bp, Homo sapiens
tggctttgcacacacacccagtgcctcgtttccccgactttattcagtggcacgttcacagcggggatgggggtagacacaaggtggggcctgatctgtcctggagccctgggggcaccacacaccatgcactatggatgggagggggcacaggaggggcttggtggccccacagaagcctgtgtaccagggaggaggcggtgagtgcctgggtccccctagcccaggcccgcaatgggaggggctgatactgggctgagattgaggggtggggatggggggcacaaagtgtctgctccagaagggccaagtggccaagcccttgcaagggcacaagcccacgccaagggcatgagcccacagggcagctggggacactctggacacagagctatgccactctccctcttcccctctggtgagggagaggaggattctgggctgggccaaacagctaccctgtcctgccccatcctgtcctcggccaatcagaacggcttcgatgtctgcttgaagatgaagcctcgataggcgagtgtcttcatgatgttggcaatgttcttgcagtcgtc

SEQ ID NO: 2870 - DNA, 572 bp, Homo sapiens; identical to SEQ ID NO: 2869

SEQ ID NO: 2871 - DNA, 16814 bp, Homo sapiens
ggagagagggacagaggctggagaaggatgtatggcctgccctgggcttgtctgttccctcctgagcctgagccccttaccttcctgaccccatgaagcacacactggctctgctggctcccctgctgggcctgggcctggggctggccctgagtcagctggctgcaggggccacagactgcaagttccttggcccggcagagcacctgacattcaccccagcagccagggcccggtggctggcccctcgagttcgtgcgccaggactcctggactccctctatggcaccgtgcgccgcttcctctcggtggtgcagctcaatcctttcccttcaggtgagtgtgcccctcccccatgagggcctcagcatttgggtccccagcccggcttcctctgtcccactctaccatgggatgtgcccaacctacaagcaggcacttgccatcttcctggggtagaaggcggaggatctggggagggctccagaacctgctgtgtgactgtgggtaagcctcacttcctctctgagcctcaggtgctctgtctgtaaagtgaggaggttacattggaaatacattagacctgactcagacatcctcttagtctatcggtgcttgggttgggtggtccaggagtgtctgaaggaccctcccagtcctgtcccttgctgcttgaggggaagaactgccaggccagaccccttctctgcctttgcccaggctcaggactgacctgtagggtccaggaggagaggtctgcagcctcctctctgctcgccctcctgtagcagtgctgaggtcagggcaggatggcacagggctgcggtgatgcagccttctgcgagggtgccatggtggtggcaggagccctgcctcagagccactttgccctggcagtggggagaggagggacacaggggcagggcagtggctgtccccaaatcctcagcttggctctttcccatagagttggtaaaggccctactgaatgagctggcctccgtgaaggtgaatgaggtgagcaagctggggaaaggtgctgggggagggagttctggggtgagcagcagggtgggagcagaaaagccttggctccccttagcccacctcgctgggtgtccactaggcaggggctcaggcatcctctcccctcctctgtgggcgctgcagtccgtagacctgggtgcaaaccacagctctgccatttactggcagtgaggtttgcagggagctggaacttcctgaacttcagcttcctcctgtgtaagatggtgatgagcagtaagaatgcggtcacctctgggacgggttccatgagatgcaggccatgcccctgacggcactcccgccccttctggtttccctctggactcaggcagaagccagggctgggcagtgggggtcgggtcacccctcatgccctgctgcctgcccaggtggtgcggtacgaggcgggctacgtggtatgcgctgtgatcgcgggcctctacctgctgctggtgcccactgccgggctttgcttctgctgctgccgctgccaccggcgctgcgggggacgagtgaagacagagcacaaggcgctggcctgtgagcgcgcggccctcatggtcttcctgctgctgaccaccctcttgctgctgtaaggcgctgcccagggcccgggtagggcgggctgtggcccccaggctccctcttacccagcaagcaccttcctcctccctccattcccacaggattggtgtggtctgtgcctttgtcaccaaccagcgcacgcatgaacagatgggccccagcatcgaggccatgcctgagaccctgctcagcctctggggcctggtctctgatgtcccccaagtgagcactgttacccctcaccctcatgtgcccctgtgagcactgggcccgggcaggacagagccgagtgggccctcgatggcccataaccagcgcatctgaaagccgcctcctctcccgcccttgcctgagagtcgaccaccctcagggtggatgccataggggcagggaaggggccagggagagaagggcgtaaggactgtgggtgaccaggaagggcagcctcagggccttgtgtttgcctaggagctgcaggccgtggcacagcaattctccctgccccaggagcaagtctcagaggagctggatggtgagggtctcggggactggcaggtgggctggctccttccagggcccctgctcgggtgcctcggtgggggcctctcactccctcattctggacacccccgggaacaggctggtagaggtggggatcaggccggctggagagcaagagtggccgccactcagctgctggaggaagaagccgtgtccccgctccttcactcccctccaccccccggctcctgcagagcccggtggggcctggggaggcaggatgggaatggggagggcccctccactcttggggtcccaccctgcagactgccctgtgctctgcaggtgttggtgtgagcattgggagcgcgatccacactcagctcaggagctccgtgtaccccttgctggcggccgtgggcagtttgggccagggtgagctggagccgcatcctggatagtgtggagcccagcgggtgtcctcctggggcgatcccacctgcacctagccctggatttcctgagccacctctgccccacctgtgacttccccatcgctgtaccccaggatccagcccccctcccctggcttaatgtgccctggggcagtttccactgtaggcaggaggtcaatgatttgcaggtccctttggctgggggaggggagttctgcctcctgcaaggcgtctggggatgcatatggtggaccctgctcaggctgggtgtgggtctctcagtcctgcaggtctccgtgcaccacctgcaaaccttgaatgctacagtggtagagctgcaggccgggcagcaggacctggagccagccatccgggaacaccgggaccgcctccttgagctgctgcaggaggccaggtgccagggagattgtgcaggggccctgagctgggcccgcaccctggagctgggtgctgacttcagccaggtgcagacccaggacagagtcctcttaaagccacggagggctagctgcctgctgctcctgggatctggcaaattcccagtccccttgccccaatgttcctcccttgctccacccacccagggttaatgcgggtcatcctggcagtgggtggagtgctccccaggccacgccctgtacgtgaacttcatgtgtgtgagctccttgagttcttgctgccaccaggggcagtaagagccatggcagtcctcattttacacttgaggacattggggttcagaggcccctgcccccctcatccaccctcagggatccccttcaggcctctccatgaactttgtcataacccaccttcccccatttcaggtgccctctgtggaccatgtcctgcaccagctaaaaggtgtccccgaggccaacttctccagcatggtccaggaggtgagagccacctggtctgcctgatttctccctcacctgccaagtgagggcctctgtttcccccttttgggcaggaacccagttgaacctaatatttggggtcccacccaccacacagcaccctgggcaggggactcccgacgaccatccttggtgtgcacacaatctgtgctcagatgggagagctgggcccttcaaggcggcaggcgtctgggggtggcaagggagcagtgctcagtctgagcccagagggcaggcggctcccctgggtggagatgggccaagggggaggatgcggtgttgtgagtcagcgcccaggacccaggacctggagctggggaaatgatgagtcagccatgctgggtggctggagtggaaggttccagaaggaaggaagtcagagctgaggctagaagggtggactggagctggaccttcaggagctagacctggcagttgtgtggagggcggctgagagttcactgcaatggtgggagagggatgggggtaggaagaagaggtccgggaggagcaacgttttgggaagttgagtcagactgggccaggggatgggagaggagggcagcgaccaagagaaaagagggaaactgggagcactgaggggggccctccctctaggcctggtgactttggggtctcccaagaggggacactgggcagagatggggaggcccagcactacttggttcctgcaggagaacagcaccttcaacgcccttccagccctggctgccatgcagacatccagcgtggtgcaaggttaggccacacgggtcagaggcagctgccaggcatggcttcccaccccacccctaccagggaggcttgttgagagaggactggggtggcgggggactgtcttccctctgtggttcccagatgttcttcctgcccgcttgtcttgttcctgggccccagggtgccctccgcatcccacaagtccctgttactttgggcagagctgaagaaggcagtggcccagcagccggaaggggtgaggacactggctgaagggttcccgggcttggaggcagcttcccgctgggcccaggcactgcaggaggtggaggagagcagccgcccctacctgcaggaggtgcagagatacgagacctacaggtgctgggcaccgcagggtgggatggggtggggtggggtgggcagcccagcctctatgccaccctgacaccctgagccccattcccagcctctatcagcccctgactgtactgagcctctgtgttttttgtttgtttgtttgtttttgtttttttcattttttttttttttgagacggtgtcttgctctgtcaccaggctggagtgcagtggggcgatcttgggtcactgcaacctctgcctccccggttcaagcgattctcttgcctcagcctcccaagtagctgggactacaggcgtgcgccaccacgcccagctaatttttgcatttttagtagagacagggtttcaccatgttggccaggattgtctctatctcttgaccttgtgatccaccagccttggcctcccaaagtgctgggattacaggccttagccaccgcgcccggccgcttctgcatatttttaagccaagacccctgactccagaggcctccaagtccctatgaggctgtgtgcccttggaacctgagcctggagaccacacaagagcagtagggcctcaggaagagtctgtatctgcatttctgaagccccagccttggggttagaggccacacccggtcgccacgtcccgcacctgtccatgttggtgccagccacctcctttcttagtgacacccatgtcctctctgtggcaggtggatcgtgggctgcgtgctgtgctccgtggtcctattcgtggtgctctgcaacctgctgggcctcaatctgggcatctggggcctgtctgccagggacgaccccagccacccagaagccaagggcgaggctggagcccgcttcctcatggcgtaagaaagggctgggagaggggaagggtcccctcttatagggctggctgattactctcgctcctgagcatagctcccggtgtggctgccagtgtcagtgtcatcatctgaataaaggggttgaaccagagcaggaatggccaacaaggagctcttccttcctacagcaggggcaactgtagcacctaatgggcactccttaccctgagtcagacacagcctagagtccctaccccagcttccaggcggcccccaccaccaataggcagcagcaccagaggtggaatctgtttgccaaccccagactagacggtctctaaggccaaggctgccacatacagttgtacaggctgttcactgaacaagagtacctggctaagggggtaagtgggggctgaaatccaccccatgttttactttccaagcctcacagcctgacatggggctgtgcctgcctcataagcccttcgagccccctggtctaagatctttactcctcagacctgctgggattctgccctgtcggcaggtcatgcctggtcatgccaggtgacccttttgagtgctgggtcctggagtaggtcacctccatgggccctaggcacagaagtgagcagtcttggctctttgggttttgtttgttttttgttttgtttgttgttgttgtgacagggtcttgctctgtcacccaggatggagtgcagtgacaccatcatggctcactatagcctcaccctcccaggctcaagcgattctcacacctcagcctcccaaacagttgggactacaggcgtgtgccaccacccccagctaatttttaaaattttgtagagacatggtctcacttattgccctggctggtctcatactcctggactcaagctatcctcccacctcaacctgtcctcccacctcaacctcccaaagtgctgggattataggtgtgagcccggatagtcctggctctttgaacaaaacagctgttttctcctctaggctgccagggccagccagggaaccaggaacagggtggggatgaggtgaaggtgaggccgggacagtcaggaatactgggttctccctcctctccaggaggccaagtcctccaagctcctttcctctaaaggctctgtgctggggccaactggctgagcaggctggccctggggtgagggtgggacagagggtatggtcagggcagccagtccctgctgtccctcagtcctgcctctcgcctaccccagaggtgtgggcctcagcttcctctttgctgcacccctcatcctcctggtgttcgccaccttcctggtgggtggcaacgtgcagacgctggtgtgccagagctgggagaacggcgagctctttgaggtaggcctgtctctgctcacaggccctcctggggagagaggtggggggcggtatcagcagagcaggagggttgggggaaagtgggggtcggggggtaaaagggagagagggaggggaggagtgagacagacatggccaaggaaagagacagaaacccgccagtggatggtggagggagagagcacccatgagtccctgagatgctgcccaggccccagggcagggaccctgagagatggcaccctgacccattccctctcatctcctaacactgtctgggagctgggaccctggtgcccggtgagctgcgatgctggactgggttctctgcagaagatcgggctgggcaaccctcctagggattcatgggaagagcccctgtaaggatttggggcccaggggtcaccagagttagaggccaggtgtgagctggggtgaggggatgtttcctacccctggtctgtgctgtgccacagcagcacagggccaggccctaggggaccagggtggccttgcccccaccccgctctgtgcccatttctcactgccccatccccagtttgcagacaccccagggaacctgcccccgtccatgaacctgtcgcaacttcttggcctgaggaagaacatcagcatccaccaagcctatcagtgagtggacagcctgggcagagctgggaccggggaaggaaggaggagggccggtgtccctcaggggacatcagcccccccgccacccccaaggctcatcgtctgcacccctcactcctcctcaggcagtgcaaggaaggggcagcgctctggacagtcctgcagctcaacgactcctacgacctggaggagcacctggatatcaaccaggtgagagaacgttttggaaactgtgaggagccctcctcagatccccctcctctggtctttttgcctctgtggaggcaccgtctctttgaacctaggagacctgagaagtctgtgtgagcgattaaggtgcccaagggcagaggcccagttatcagctctggggaaggttccgggtgtgtaggtgggtccgtgtgcacctgaaggctatgtccagccccaagcacagccaaggtggcagcaggaaaggctggtgacagtgagcaggaggatgagggggcccatgtgtcctgactgaggacaggcattggctgggatgctccacttgggagggggaggctggggaaggacgtggcagtgacaaggatggtggtgagtctggctaacgttggtggagggcctgccaagctcacgcaggtgggaggtggtggtggcaggattccatccccagcctgacaagcctcttcctgtaacctctggagttactggaacttggtgtgtagaactggagacacttgccaatgctggaaagagacagttctagaatgaaggcaaggaagggctgtttcacaagagggatggactttgagaatggggctctcctcatggtgcacagcagctggaagacattcactcctcgacttccacgctcctaagcatatgctggggaaacccacatcccctggccctggttcccctcgccctccccaaacacagagcatgctaactcctgattttgcatcgttctgggaaacccttccaacccctggatccaccaaccagcctcggcccacggacagcacagccggatggcccagccccaactctgtaccttgaactgcacaacctgggacagttatgcagctcactcctccttccgcatctttaaccagacaggagctccccgagcaggcgatatctcagtgctaggctgagacactgccctgtggaggaagcctggccagggagggatgaaccaggggcctgggcagaggagcccccatcctctactggcaggaagccatggctctcgaggggaggagtcctgggctctggtccttggcaggggagggtccagctcacaggagagtctggatagatagggctttggattcagatgcactgggcagtcctctgaggccacctgacaatgtaccaaatgtggctgtaagaatcctcgtcctcaaaggagacactgatgggtaggcagacatgagtaacacacagggctttccagagcacggggagggcaccagccacctttccacttctcctgaagctgctgccactgatgcctgagacacggcccgaaggcccccacccgagagggccaggccttttctcctccaggagaaggcagcctggagggatgcggggaggagagccaagctgggctgcagtctctaaccacctgtgtaacctcggcaagtggacgctccactctgacctcagtttcttatctgttaaacactgggctgacttttatgacctctaaatctcttccagtgatagtaggaaaatgctaaggctctttcctgaaaatacagtttcattcattcattcattcattcattcattcattcattcacacagctaacaaacttgtctcctgcccaccatgtgtgaccctccgagttagatgctgggggtttggggctgaataggcaggcaaagtcccactcttgtggagctgacagcattgaacaattaacccacaaataagatcatttcagagcaacaagtgctttgaaggcctcgacacagctgatgggataaagagcggctgagagagctattttatttcaggtggccagggaaggtctgtgtctctgcccagaagccagatgggcactggaggaaggccaggtcttggcatttggggcaggggcctactgggagcctgtctggggcttggggtgtccagggcagggggccctgagggcctgctgtgtgagtctgttcttgtgttgctataaaggaatacctgaggctggggcatggtggctcatgcctgtaatcccagtactttgggaagctgaggtggaaggattacttgagcctaggagttcaagaacagcctgggcaacatggggagaccctcctctacaattttttttaaaagccaggtgtggtttcttgcacctgtagtcccagctactcgagaggctgaggtggtagaatcactggagcccgggggatctaggcttcagtgagctgtgattgtgctattgccctccagcctgggcaacagagcaagaccctgtccgcttccccaaccaaaaaaaaaaaagcaatacctgaggctgcataatttataaagaaaagaggtttaagtgcaggctgtacaggaagcatggcaccggcagccgtttctggggaggcctcaggaagcttccactcatggccgaaggccaaggggagccagcacatcacatagggagagagggaacgagagagccaacgcagaggtgccacactctttcaaacacgtgaaataactgagcaaaactcactcatcacatggcaatggcactaagccatacgtgagggatccgcccccgtgatctagtacctcccaccaggcccaccttcacccccaacaccggggatcacattgcaacatgaaatttggaggggacaaatatccaaaccatatcgcctggtgacccctgtgcttaggggagcatctctggggtcctggctcagcaactgggcatgactcccaccctgcgcctgctctcccagtataccaacaagctacggcaggagttgcagagcctgaaagtagacacacagagcctggacctgctgagctcagccgcccgccgggacctggaggccctgcagagcagtgggcttcagcgcatccactaccccgacttcctcgttcaggtcagcggtgggcacctcagcagggcttcctcagcaggtggtgatggaacgaaggggcccacagaggagctgggtgtgcatcttgccttgtcccagctctggctcttccacatttcctggggcctcttcctgtggaggtgtccccagatcatgtgcccctgggcctgtcctcctgccaccaccccggtcacacaggaatggacaacctctcccccaacccaacagcatgtgttgctgttcatggtcctgaacccactgctgccgaggacgcattgggaagttgcctcttccttagttacaccagagggtgccttatttgttcttgttgtttctatctcactgggaaaatgtctgaaatatttcacagttccagggaaaactcactgtgactgatgtgtcacaatacacttagctggtgtaggttatatttgataagactggggatttggaggctgggatcaggtggtggtgggccccaggggagctgggttcatccctcctggcctcttctgtccacctgcagatccagaggcccgtggtgaagaccagcatggagcagctggcccaggagctgcaaggactggcccaggcccaagtgagtgggaaacagggccccgactgggcagcaggagccacagggggcttgggaggcgggaaagggtgggaggatgtgagggcaaaggcagggaactgaggacccccaccagtgaggcctgaggctcctgacccctggctgggctggagggttttgcagcatcagttctgactcaagctctgccacccgttggctgtgtggccttgggcaagacatgcagcatctctgagccggaggttcttcatctgttgggtggactgtcctccatctcagagcagatgaaatcacttctctggcctcacgcagttgggcaggtgtttctgtgtgtgccacttgtgggatttgctgggacaggtgctgtgaggacattgggatgaatgagatgtcatggcagttgcccttgaggggaaaaatagcattttgtatttataactatttagggtttaaaagttctctttgaaacatcccataggccccacaacaaccccacagggtgggcagagccagaagcatcctcaatttcagcaggtgcccctgcagctcaggcatgttctgtgactgacttaggggcacccagcaagctagagtgaacctagaatttggatctaggccccccaaaccaagatcaggccctggagcttaaggaggcctcagttttctgcctctgagcccagcactcccactttctcttggtatgtcagactgaaaggctgggtgacgggtagatgggtcctgggcggggccgttctgatttttgtatcctttcaggacaattctgtgctggggcagcggctgcaggaggaggcccaaggactcagaaaccttcaccaggagaaggtcgtcccccagcagagccttgtggtcagtttggaggcccggggagcctggggcctgggggaggggagacgtggagaggggacagtgaaaggggagggaagttctgagagtcccttccctcccctcctctcccctcctctcccctcctctcccctcctctcccctcccctcccctccactcccctccactttcctcccctctcctccctccccttcccttgcactcccctaaccagccctgatctcttctccacaggcaaagctcaacctcagcgtcagggccctggagtcctctgccccgaatctccaggtggctgctgttggtggggacgtatggtggagcacaggggctgcagaggcggggaggaagtaggagcccatctcactctgcacctcagagctctgcccaggttgcaggtggggttgggaggaagatgggggtggcagcagagcctgggggatcaccacccttggcttgtctgttggagctgaaccctctcctgctgagtgtgctgtggtgtgtgttgaattaatgaatggatgcgtgaatgtgggacactgagttgaggctctcgtcccctccagctggagacctcagatgtcctagccaatgtcacctacctgaaaggagagctgcctgcctgggcagccaggatcctgaggaatgtgagtggtgggtgggacagggaaggggcttccaccccaggcttctccagtcccagcttctcactgtggctcccaggaaagctgggcctgtcctcaagttgccaggcatggggggtggcgtgggtggggggcactgctgcttctgggacccctacagctcagacctcctttccttcctgcaggtgagtgagtgtttcctggcccgggagatgggctacttctcccagtacgtggcctgggtgagagaggaggtgagtggggcctcagaagcaatgactgattccctgctccatcggaccagctgttcaccctgctctgccccgcccccgcccccggagccccttgggggtgacccaggccttcaggatcaaacccaaactcccaaacctggcatctgcacccctgcttgctggctgagctctgtccaccccacctctgctgcagcgcttccctgagctgagtgtgagcagggttggcgttctccaaaatgtttcatcacacctggcctgcaggtccttccctgggctggccctttccccagcttgtccaaggccaatcctcaaagcccacctcccgatgcagacccttgctgaacacagcctctgcaagctgtctggatgcccacactagggcaacagtggtctggttttaccctgagtgtgtctgtgtgtctatgtgtgtgtgagtgtgtgtgtatgcatgcacacacatgtgtgctttcaagcactgtggcttgacacacagtgctgggtcatagtaggccttaatccaggctggtgaacagatggaaaggggaggggcccagcgaggagtctgtagagtatgtccgcatctgtctgtacctgcctctctgcatgtgtatacaagtgtgcggtggccccaatggtgtccccaggcctttctgtgtccctgtcaaccactctccctgaattgaatatgggtgtgcgcctgtgggtccaggtgtctctgcatcacctgcctcatgttggcgccacaggtgactcagcgcattgccacctgccagcccctctccggagccctggacaacagccgtgtgatcctgtgtgacatgatggctgacccctgggtgagtgccccagctcatcggggcttgttcaccaagtcccggagccttcctgctctccagggagggccgggtgagcagggtgtgaagccaggcatggcctctgccccggctctgatgacaaggcagctgggtgaggctgggtgccacgtgggttggtgagccgacctcacgccttgttgcagaatgccttctggttctgcctggcatggtgcaccttcttcctgatccccagcatcatctttgccgtcaagacctccaaatacttccgtcctatccggaaacgcctcaggtgaggggctgccagggctgcaggcagcatcaggggccagggaggtgtcctttcagccgccagggtcccctgtcacagcccctcctgagacctcccaggcagaggaggctcatgagcgagccctgaagagccacactctgaggagctccaaagccaggaagttctcccgtatgtctgccccttacccttcttgctgcatccatttgggcgcagcttcgtgggacccttcccatcccccacagggcttccgaggagaaaccctcagggctctgggtttgtccctgtgtcagggctgagggtctggggggaagggtatgctcactctctgtctttgacactgcagctccaccagctctgaggagactcagctcttccacatcccccgggttacctccctgaagctgtagggccttgtgggtgagttttccccaactcgcttaattgctccctgccagggattaagggagtggggtggggaggggctggggtctggggtttccagggcctaggagggcaggaaggcttggggacatggtggagtctgggtattgggtgtggcccatccagcagtggggctgacagccctgttctcccctccctccccttcacccgtttccttcttaatccctgacagggtgaggtgaccctgaggctgcctgtcctcccctttgatttagcctgggccacaggacttcggtagctcttgccccagagcccaggctggcatccaggcctggactgtccccagttccggcttacctggccccaccttgcctgctcctttccacccctttctgctcacgacccccatcattcacgctcagaatcacatgggacttctgtgcagctgcagagccagcaagtccctccaggtgtcaccccttacccccatgctggtggcatcctcacaggaagagcctgttctccacctgctggagcctggaccctggggtgggacagaggcctcgtccaaccccactccccttcccgtgtgtcttccccctgccaagcctccccctgccaagcctccccctgcccctctctgagcccctcgccccccacaccgtcctcatctggcctcccccctggcccccacttccctcttatgcccttcctggccctttgcttcctcccttagtcccctcttcaccatatctccactgctaccttgctggccccagagaccaccctgcccaaccaaaccactcaggtaacgccactaatcaggcaggggccaccatggcctaggtctgggctggctgcagccctgcctcatggcctctgagccctccactgccccagggccttgggccctctgcagatctcatccaggatttattggtgtccagtggggtgagggaggcctgtctgaaggccgagcctccctgcctgcacccaagttagaaatgggggtaccagcacttagcttctctctgagtgctggctcccaaggaagggacctgggacctgggccacagtgggggcttgcccttacctcttcagaaggaagcatcttccacagcccccacccaactttcttaggagtgatctggtggccagaacaggattttgcacggccccttttatcctgcgcatgtggcctagggtcatccccagcccatccctgtgtcagccctgagtgctggacactgcgttccagaaatgaggaagaggagagagaagagatggacagacctcagatccattaaagtgttctcacttccctgagacttggttctgggtccttaaaaccaggtttcctaggctgggaccctgtacatagttggtgtttaatgagtgtttatggagaggagagttctaaggtcacctctggctgcaggcatccagggattattccagcaatctgcaggtagggagtgggtcccagcctgggagcctgctgtcaggagcaggcagacctggactcacagcctggctgtgatgcttgttcgctcagcttctccatttatgagatggggagaatagtcacagcctcctcaaagggttgtgaaaatcaaatgtgataatttgtggaaagcccttagcagtggcctggcacaaaacaaatgctcagtggatggaagctgcctattattattgtcgttgttgttgtttgccatgactgctctgggccgggggtagagctagcatccgggcatgtacgagggaagagggaggcaggcctctattcaaaggcagaaattcctttaagattgtggtctgctgggtttcagggagtgtctgtgttgtttgtttttgtttgtttgtttgttttgagacagggtctcgctctgtcacccaggctggagtgtagtggtgcagtcttggctcactgcaacctccacctcctgggctcaagcgattctcatgcctcagcctcccgagtagctgggactacaggtgtgtgccactatgcctggctaatttttgtattttttgtagagacggggttttgccatgttgcccaggctggaagtgtctatgtttaactgcatcttataaaccagcaacaagttttctactgggaattagaatggtgcatacacaatgtattattatcactgtcagatgagcatgcttgaatgtagcatgactgcctctttttgcttttcctagaggttttttttttgcttgttactcatctgttgacctacctgggggaagtagcacccttgcatttcaaaaataaaattgatggcattacaaatggaatagaaa

SEQ ID NO: 2872 - DNA, 256 bp, Homo sapiens
gtctgtttctagtgcctgttgtttctcttgttttttgttagttttgtcctgtctcctcccatacttggcaatgttttaattgagtacaagtaatttcaggtctaggatggagttatcttcctctatgaggattatgtttacatctggcaggtggctggggatgcagtgagccagatctctttcatctacttgtaggggatgagaggatttgagtcactttaagggctgacctacttctgtttcattcatattcata

SEQ ID NO: 2873 - DNA, 172 bp, Homo sapiens
ttctttttttttttttgagacagattctcgctctgtcacccaggctggagtgcagtggcacgatctcagctcactgcaagctccgcctcccgggttcatgccattctcctgcctcagcctccccagtagctgggactacaggcgctcgccaccacgcccggctcattttttt

SEQ ID NO: 2874 - DNA, 2523 bp, Homo sapiens
ctcaaaaaaaaaaaaaaaaaaaagtgaaggaaggagacagcagattggaaataacactggagtggatgggatgtcctcttccctgagggggccggggtaccagacgggaggctgggagaggatgagaggctgccccatggctggaggcagtgtccgtgtgtgcagtcaccatcatcaacccccattcggccccttccccagatgcgctggtgacaggggcttcttggatgtcaaatcatgttgtaggagggtgcagactgcgggcttctgtggggagcagtactactgtgtctgtcggcagtggccatgggaccctcagcccgtcctgtacatggagcagggtgcacagtcaccctccatcctgtggcgagaggctggcccggcccggccaggcgaggcagaaggtgtcggccaagtggccccgaccccatcccgcagtctctcagctgctttttattacctctgtgccccatttgggagtttgcttcctccacctggacactttgcccgggaggtcatcagagcccaaccccaggctctgctcggttggagaggggatgacttcaccaccacctgaccttcctagggtcctggtctcactgtcagctgggggtccgttgtgtgtatttgtacagttttgctgtatggggtttgtcacccaaaagctgatgctgagaaaggcctccctggggcccctcccgcgggcatctgagagacctggtgttccagtgtttctggaaatgggtcccagtgccgccggctgtgaagctctcagatcaatcacgggaagggcctggcggtggtggccacctggaaccaccctgtcctgtctgtttacatttcactatcaggttttctctgggcattacgatttgttcccctacaacagtgacctgtgcattctgctgtggcctgctgtgtctgcaggtggctctcagcgaggtacggggagggcgtcaccctgcagaacggcagagtgacgcgtcctctcgctgctgagcaccagctgtttacctgccctgcatcacttcctcggatactttactcaataagcatttcccctggagtgtccgtgccctggtgttttttatcgatacgttgattaaaacgcgtggttccccgtgtgcctgaagcagacattgctgtgaaatcttttatttttgttttatgacacagcatcaatttcatgaatactttgaaagggccattagaaaaaataagagccaatttgggtcatttgagaaacattttcagcacaattacagtgggggcacgggccgttcggctccagctgggttttcccagatgcaacaatcgcggttctggcttctccactggtggggatggggatcgcgccttcggagctctcagggcgcctgtctgtcgggggctgggtgcgtccacagccccgggggatggcgcgtggcgtagcccaggaacggcatgtgggtgggtctctgacctgcttgtgcagggacttgagggacctcatcccgatggccgaggcaggggctccccacgggataaaaggatccggcctggccttggggtccaagaggagggccaagggagtggacctggcccctgtcccctctcctcctcgaaacactggacaccctgaagcgagactatggctgctgaggatcctgtgtgatgtggccgcggggcgtcccctctggcctcaggggaagaaggactgggcggctcggcccaggtcaccctctaggaagcagaggaggtgcaggtgccagttcagggcagaaagaaagagccactgaggccattgtcctgaaggcggtgacccccaggcactcctgctgccccccaggaagccctgggctgcgctggacaccgggccgagtctccgtcttctggaccgaggctcttctgggctttcaggctcagctcgtcggtccattcagcaagttcaggggcagactgagccctgctctggccatggctcagccggaaacaagagctgccatgttcgtagcacctgagtacccccgccggggaggtctctgtcatctcatgtccccgctgggcaggtgccccacagcaggggagccctgggctctctctgtcccaagctcccagctgcatccaacctcagctcacagttgtggatcaccctgaccttccagagtgcccctcccaaggggcagacccagcatcctggagtccccaccccgagctgtgctgaaggacagctggggcggtagggccaggaccagaccaggcctctgacaaagtctcatcgaaatgaaaccaatgtgcccgggccaccttaaggggccctgaccaggaaagttaggcctgaagctgccaatgccagatcctcagggtgttacctgtgtccttacgtggctaggcctgaccccaagtgccacaacccccaacttggggagggcagggccacctggtggggacgggccagccagagcccttggtctcagctgtggcagccacatccctggcccggcttggccctgagggcctttgggacatctctgggcagaggca

SEQ ID NO: 2875 - DNA, 253 bp, Homo sapiens
gaagggctgcaccaggaacacccagccctgtctcctgctccagttccacagcacccctcacaccctgccccagaccctccacaaccaggcacagcctggagtcaacacatccaggagccccaacttgggaggagggaggaagagactccagcccctccccaccattcaacttttaaggatgaattggaggtcatctgattagagtttctggcagctccaatcatctctgattggccccactccccgagcagcc

SEQ ID NO: 2876 - DNA, 1115 bp, Homo sapiens
gatcgccaacaaagtgcagggcagccacagcctgagccgggggacagtgtgtcatcgcaccggcgtgcagcctcacgagcccaagggccacggctgggactacggcatcggggtgagcggggcccgcggccttgggctgtgttatcaccttgtgcctgcactgggtgctgaagacgggacgaccactgtgggactgtcccctgggacccggtgtctgggttgcagggaggcccccaggcagatcccctccaggatcctcgagtccccgagtcccctggtgacacagctctctccttccagggaggctgggaccatatctctgtccgggccaatgccaccagggccccccggagctcgtcccaggagcaggagccgagtgccccaccagaggcccatggccccgtctgctgctgaggcccccccacacacctacatgcagggacggtgcccagtttgggggatcaaggctgagccattcttgtgctggagtgtgcaccgtgggagcaatgtggcccaggtggactcaggagggaacctggccccaaggctgcggccacttcagaggcactggctgagacggccctgaaatgtgaagctccgcggacactcccacacgtgtccccgtctgcgaggagtcccggggtgtggggcatggggtggggctgcacctcccagaggcccctcccacccttcccttcccctctcccttctgcctttccaggactagaaccgggaacctggagccctccgggaacgccggccctggggcagcagagccaggatggagccctcctgagctggcatctcagacagcacccgggcccgccacccctcaccaagagagatggccatggggctcagggcctctttaccatgtgcagtgaccatttctcagagcaggacttgcaaagaggctttaatttcaaaagtgaaggaaggaggccaggcgccgtggctcacgcctgtaatcccagcactttgggaggctgaggtgggcagatcacctaggtcaagagtttcaaaccagacgggccaacatggtgaaaccccatctctgctaaaaatacaaaaaaaaaaaaattagctgggcatggtggtgggtgcctgtaatccca
